(19) United States
(12) Patent Application Publication
(10) Pub. No.: US 2022/0127594 A1
(43) Pub. Date: Apr. 28, 2022

(54) COMPOSITIONS AND METHODS FOR TREATING GLYCOGEN STORAGE DISEASE TYPE 1A

(71) Applicant: BEAM THERAPEUTICS INC., Cambridge, MA (US)

(72) Inventors: Nicole GAUDELLI, Cambridge, MA (US); Michael PACKER, Cambridge, MA (US); Ian SLAYMAKER, Cambridge, MA (US); Yi YU, Cambridge, MA (US); Bernd ZETSCHE, Cambridge, MA (US); Yvonne ARATYN, Cambridge, MA (US); Francine GREGOIRE, Cambridge, MA (US); Genesis LUNG, Cambridge, MA (US); David A. BORN, Cambridge, MA (US); Seung-Joo LEE, Cambridge, MA (US)

(73) Assignee: BEAM THERAPEUTICS INC., Cambridge, MA (US)

(21) Appl. No.: 17/430,274

(22) PCT Filed: Feb. 13, 2020
(86) PCT No.: PCT/US2020/018124

§ 371 Date: Aug. 11, 2021

Related U.S. Application Data
(60) Provisional application No. 62/805,271, filed on Feb. 13, 2019.
(60) Provisional application No. 62/852,224, filed on May 23, 2019.
(60) Provisional application No. 62/876,354, filed on Jul. 19, 2019.
(60) Provisional application No. 62/941,569, filed on Nov. 27, 2019.
(60) Provisional application No. 62/966,526, filed on Jan. 27, 2020.
(60) Provisional application No. 62/912,992, filed on Oct. 9, 2019.
(60) Provisional application No. 62/931,722, filed on Nov. 6, 2019.
(60) Provisional application No. 62/852,228, filed on May 23, 2019.

(51) Int. Cl. C12N 15/10; A61K 31/7105; C12N 15/113; C12N 15/90; C12N 9/22; C12N 9/78

(52) U.S. Cl. CPC C12N 15/102; A61K 31/7105; C12N 15/1137; C12N 15/90; C12N 2320/34; C12N 9/78; C12Y 301/03009; C12Y 305/04004; C12N 2310/20; C12N 9/22

(57) ABSTRACT

The invention provides compositions comprising novel adenosine base editors (e.g., ABE8) that have increased efficiency and methods of using base editors comprising adenosine deaminase variants for altering mutations associated with Glycogen Storage Disease Type 1a (GSD1a).

### CROSS REFERENCE TO RELATED APPLICATIONS

[0001] This application is an International PCT application which claims priority to and benefit of U.S. Provisional Application Nos. 62/805,271, filed Feb. 13, 2019; 62/852,228, filed May 23, 2019; 62/852,224, filed May 23, 2019; 62/876,354, filed Jul. 19, 2019; 62/912,992, filed Oct. 9, 2019; 62/931,722, filed Nov. 6, 2019; 62/941,569, filed Nov. 27, 2019; and 62/966,526, filed Jan. 27, 2020, the contents of all of which are incorporated by reference herein in their entireties.

### INCORPORATION BY REFERENCE

[0002] All publications, patents, and patent applications mentioned in this specification are herein incorporated by reference to the same extent as if each individual publication, patent, or patent application was specifically and individually indicated to be incorporated by reference. Absent any indication otherwise, publications, patents, and patent applications mentioned in this specification are incorporated herein by reference in their entireties.

### BACKGROUND OF THE DISCLOSURE

[0003] For most known genetic diseases, correction of a point mutation in the target locus, rather than stochastic disruption of the gene, is needed to study or address the underlying cause of the disease. Current genome editing technologies utilizing the clustered regularly interspaced short palindromic repeat (CRISPR) system introduce double-stranded DNA breaks at a target locus as the first step to gene correction. In response to double-stranded DNA breaks, cellular DNA repair processes mostly result in random insertions or deletions (indels) at the site of DNA cleavage through non-homologous end joining. Although most genetic diseases arise from point mutations, current approaches to point mutation correction are inefficient and typically induce an abundance of random insertions and deletions (indels) at the target locus resulting from the cellular response to dsDNA breaks. Therefore, there is a need for an improved form of genome editing that is more efficient and with far fewer undesired products such as stochastic insertions or deletions (indels) or translocations.

[0004] Glycogen Storage Disease Type 1 (also known as GSD1 or Von Gierke Disease) is an inherited disorder that results in a deficiency in glycogenolysis and gluconeogenesis, with accumulation of glycogen and lipids in tissues, causing life-threatening hypoglycemia and lactic acidosis and leading to potential CNS damage and long-term liver and renal complications, such as steatosis, hepatic adenomas and hepatocellular carcinomas.

[0005] There are two types of GSD1, Type 1a (GSD1a) and Type 1b (GSD1b), which are caused by different genetic mutations. GSD1a is caused by a mutation in the glucose-6-phosphatase (G6PC) gene and affects about 80% of patients with GSD1. About one in 100,000 newborns in the US have GSD1a with about 22% of patients carrying the recessive mutation Q347* and 37% of patients carrying the recessive mutation R83C.

[0006] There are no drug therapies approved for GSD1a. Although liver transplants are curative, there are no approved therapies and the current treatment regimen involves nearly continuous cornstarch feeding. If chronically untreated, patients develop severe lactic acidosis, can progress to renal failure, and die in infancy or childhood. GSD1a is an area of significant unmet medical need. Therefore, there is a need for novel compositions and methods for treating patients with GSD1a.

### INCORPORATION BY REFERENCE

[0007] All publications, patents, and patent applications mentioned in this specification are herein incorporated by reference to the same extent as if each individual publication, patent, or patent application was specifically and individually indicated to be incorporated by reference. Absent any indication otherwise, publications, patents, and patent applications mentioned in this specification are incorporated herein by reference in their entireties.

### SUMMARY OF THE DISCLOSURE

[0008] The present invention features compositions and methods for the precise correction of pathogenic amino acids using a programmable nucleobase editor. In particular, the compositions and methods of the invention are useful for the treatment of Glycogen Storage Disease Type 1a (GSD1a). Thus, the invention provides compositions and methods for treating GSD1a using an adenosine (A) base editor (ABE) (e.g., ABE8) to precisely correct a single nucleotide polymorphism in the endogenous G6PC gene to correct a deleterious mutation (e.g., Q347X, R83C).

[0009] In one aspect, the invention provides a method of editing a G6PC polynucleotide comprising a single nucleotide polymorphism (SNP) associated with Glycogen Storage Disease Type 1a (GSD1a), the method comprising contacting the G6PC polynucleotide with an Adenosine Deaminase Base Editor 8 (ABE) in complex with one or more guide polynucleotides, wherein the ABE8 comprises a polynucleotide programmable DNA binding domain and an adenosine deaminase domain, and wherein one or more of the guide polynucleotides target the base editor to effect an A•T to G•C alteration of the SNP associated with GSD1a. In another aspect, the invention provides a cell comprising an Adenosine Deaminase Base Editor 8 (ABE8), or a polynucleotide encoding said base editor, comprising a polynucleotide programmable DNA binding domain and an adenosine deaminase domain; and one or more guide polynucleotides that target the base editor to effect an A•T to G•C alteration of the SNP associated with GSD1a. In another aspect, the invention provides a method of treating GSD1a in a subject comprising administering to said subject: an Adenosine Deaminase Base Editor 8 (ABE8), or a polynucleotide encoding said base editor, to said subject, wherein said Adenosine Deaminase Base Editor 8 (ABE8) comprises a polynucleotide programmable DNA binding domain and an adenosine deaminase domain; and one or more guide polynucleotides that target the Adenosine Deaminase Base Editor 8 (ABE8) to effect an A•T to G•C alteration of the SNP associated with GSD1a. In another aspect, the invention provides a method of producing a hepatocyte, or progenitor thereof, the method comprising: a) introducing into an induced pluripotent stem cell or hepatocyte progenitor comprising an SNP associated with GSD1a, an Adenosine Deaminase Base Editor 8 (ABE8), or a polynucleotide encoding the Adenosine Deaminase Base Editor 8 (ABE8), wherein the base editor comprises a polynucleotide-programmable nucleotide-binding domain and an adenosine deaminase domain; and one or more guide polynucleotides, wherein the one or more guide polynucleotides target the base editor to effect an A•T to G•C alteration of the SNP associated with GSD1a; and b) differentiating the induced pluripotent stem cell or hepatocyte progenitor into hepatocyte.

[0010] In one aspect, the invention provides a method of editing a glucose-6-phosphatase (G6PC) polynucleotide comprising a single nucleotide polymorphism (SNP) associated with Glycogen Storage Disease Type 1a (GSD1a), the method comprising contacting the G6PC polynucleotide with an Adenosine Deaminase Base Editor 8 (ABE8) in a complex with one or more guide polynucleotides, wherein the Adenosine Deaminase Base Editor 8 (ABE8) comprises an adenosine deaminase variant domain inserted within a Cas9 or a Cas12 polypeptide, and wherein one or more of said guide polynucleotides target said base editor to effect an A•T to G•C alteration of the SNP associated with GSD1a. In another aspect, the invention provides a method of treating Glycogen Storage Disease Type 1a (GSD1a) in a subject, the method comprising administering to said subject: an Adenosine Deaminase Base Editor 8 (ABE8), or a polynucleotide encoding said base editor, to said subject, wherein said Adenosine Deaminase Base Editor 8 (ABE8) comprises an adenosine deaminase variant inserted within a Cas9 or Cas12 polypeptide; and one or more guide polynucleotides that target the Adenosine Deaminase Base Editor 8 (ABE8) to effect an A•T to G•C alteration of a SNP associated with GSD1a, thereby treating GSD 1 a in the subject. In yet another aspect, the invention provides, a method for treating Glycogen Storage Disease Type 1a (GSD1a) in a subject, the method comprising administering to the subject: a fusion protein comprising an adenosine deaminase variant inserted within a Cas9 or a Cas12 polypeptide, or a polynucleotide encoding the fusion protein thereof; and one or more guide polynucleotides to target the fusion protein to effect an A•T to G•C alteration of a single nucleotide polymorphism (SNP) associated with GSD1a, thereby treating GSD1a in the subject.

[0011] In an aspect, the invention provides a pharmaceutical composition for the treatment of Glycogen Storage Disease Type 1a (GSD1a) comprising an effective amount of an Adenosine Deaminase Base Editor 8 (ABE8), wherein said Adenosine Deaminase Base Editor 8 (ABE8) comprises a polynucleotide programmable DNA binding domain and an adenosine deaminase variant domain. In some embodiments, the pharmaceutical composition includes one or more guide polynucleotides that are capable of targeting the Adenosine Deaminase Base Editor 8 (ABE8) to effect an A•T to G•C alteration of a SNP associated with GSD1a. In another aspect, the invention provides a pharmaceutical composition for the treatment of Glycogen Storage Disease Type 1a (GSD1a) comprising an effective amount of any of the cells provided herein. In some embodiments, the pharmaceutical composition includes a comprising a pharmaceutically acceptable excipient.

[0012] In another aspect, the invention provides a kit for the treatment of Glycogen Storage Disease Type 1a (GSD1a), the kit comprising an Adenosine Deaminase Base Editor 8 (ABE8), wherein said Adenosine Deaminase Base Editor 8 (ABE8) comprises a polynucleotide programmable DNA binding domain and an adenosine deaminase domain, and one or more guide polynucleotides that are capable of targeting the Adenosine Deaminase Base Editor 8 (ABE8) to effect an A•T to G•C alteration of a SNP associated with GSD1a. In yet another aspect, the invention provides a kit for the treatment of Glycogen Storage Disease Type 1a (GSD1a), the kit comprising any of the cells provided herein.

[0013] In some embodiments, the contacting is in a cell, a eukaryotic cell, a mammalian cell, or a human cell. In some embodiments, the cell is in vivo. In some embodiments, the cell is ex vivo. In some embodiments, the cell is a hepatocyte, a hepatocyte precursor, or an iPSc-derived hepatocyte. In some embodiments, the cell expresses a G6PC polypeptide. In some embodiments, the cell or hepatocyte progenitor is from a subject having GSD1a. In some embodiments, the subject is a mammal or a human. In some embodiments, the hepatocyte or hepatocyte progenitor is a mammalian cell or human cell. In some embodiments, the Adenosine Deaminase Base Editor 8 (ABE8), or polynucleotide encoding said Adenosine Deaminase Base Editor 8 (ABE8), and said one or more guide polynucleotides is delivered to a cell of the subject.

[0014] In various embodiments of the above aspects or any other aspect of the invention delineated herein, the SNP associated with GSD1a is located in the glucose-6-phosphatase (G6PC) gene. In one embodiment, the A•T to G•C alteration at the SNP associated with Glycogen Storage Disease Type 1a (GSD1a) changes a glutamine (Q) to a non-glutamine (X) amino acid. In one embodiment, the A•T to G•C alteration at the SNP associated with Glycogen Storage Disease Type 1a (GSD1a) changes an arginine (R) to a non-arginine (X) in the G6PC polypeptide. In one embodiment, the SNP associated with GSD1a results in expression of an G6PC polypeptide having a non-glutamine (X) amino acid at position 347 or a non-arginine (X) amino acid at position 83. In one embodiment, the base editor correction replaces the non-glutamine amino acid (X) at position 347 with a glutamine. In another embodiment, the base editor correction replaces the non-arginine amino acid (X) at position 83 with an arginine. In one embodiment, the A•T to G•C alteration at the SNP associated with GSD1a results in expression of a G6PC polypeptide that prematurely terminates at amino acid position 347 or encodes a cysteine at position 83. In some embodiments, the alteration at the SNP is one or more of Q347X and/or R83C.

[0015] In various embodiments of the above aspects or any other aspect of the invention delineated herein, the adenosine deaminase variant is inserted within a flexible loop, an alpha helix region, an unstructured portion, or a solvent accessible portion of the Cas9 or Cas12 polypeptide. In some embodiments, the adenosine deaminase variant is flanked by a N-terminal fragment and a C-terminal fragment of the Cas9 or Cas12 polypeptide. In some embodiments, the fusion protein or Adenosine Deaminase Base Editor 8 (ABE8) comprises the structure NH₂-[N-terminal fragment of the Cas9 or Cas12 polypeptide]-[adenosine deaminase variant]-[C-terminal fragment of the Cas9 or Cas12 polypeptide]-COOH, wherein each instance of “]-[” is an optional linker. In one embodiment, the C-terminus of the N terminal fragment or the N-terminus of the C terminal fragment comprises a part of a flexible loop of the Cas9 or the Cas12 polypeptide. In one embodiment, the flexible loop comprises an amino acid in proximity to a target nucleobase. In some embodiments, the one or more guide polynucleotides direct the fusion protein or Adenosine Deaminase Base Editor 8 (ABE8) to effect deamination of a target nucleobase. In some embodiments, the deamination of the SNP target nucleobase replaces the target nucleobase with a non-wild type nucleobase, and wherein the deamination of the target nucleobase ameliorates symptoms of GSD1a. In one embodiment, the target nucleobase is 1-20 nucleobases away from a PAM sequence in the target polynucleotide sequence. In one embodiment, the target nucleobase is 2-12 nucleobases upstream of the PAM sequence.

[0016] In one embodiment, the N-terminal fragment or the C-terminal fragment of the Cas9 or Cas12 polypeptide binds the target polynucleotide sequence. In one embodiment, the N-terminal fragment or the C-terminal fragment comprises a RuvC domain; the N-terminal fragment or the C-terminal fragment comprises a HNH domain; neither of the N-terminal fragment and the C-terminal fragment comprises an HNH domain; or neither of the N-terminal fragment and the C-terminal fragment comprises a RuvC domain. In one embodiment, the Cas9 or Cas12 polypeptide comprises a partial or complete deletion in one or more structural domains and wherein the deaminase is inserted at the partial or complete deletion position of the Cas9 or Cas12 polypeptide. In one embodiment, the deletion is within a RuvC domain; the deletion is within an HNH domain; or the deletion bridges a

[0017] RuvC domain and a C-terminal domain, a L-I domain and a HNH domain, or a RuvC domain and a L-I domain.

[0018] In various embodiments, the polynucleotide programmable DNA binding domain is a Cas9 polypeptide. In some embodiments, the fusion protein or Adenosine Deaminase Base Editor 8 (ABE8) comprises an adenosine deaminase variant domain inserted in a Cas9 polypeptide. In some embodiments, the Cas9 polypeptide is a Streptococcus pyogenes Cas9 (SpCas9), Staphylococcus aureus Cas9 (SaCas9), Streptococcus thermophilus 1 Cas9 (St1Cas9), or variants thereof. In some embodiments, the Cas9 polypeptide the following amino acid sequence (Cas9 reference sequence):

MDKKYSIGLDIGTNSVGWAVITDEYKVPSKKFKVLGNTDRHSIKKNLIGALLFDSGETAEAT
RLKRTARRRYTRRKNRICYLQEIFSNEMAKVDDSFFHRLEESFLVEEDKKHERHPIFGNIVD
EVAYHEKYPTIYHLRKKLVDSTDKADLRLIYLALAHMIKFRGHFLIEGDLNPDNSDVDKLFI
QLVQTYNQLFEENPINASGVDAKAILSARLSKSRRLENLIAQLPGEKKNGLFGNLIALSLGL
TPNFKSNFDLAEDAKLQLSKDTYDDDLDNLLAQIGDQYADLFLAAKNLSDAILLSDILRVNT
EITKAPLSASMIKRYDEHHQDLTLLKALVRQQLPEKYKEIFFDQSKNGYAGYIDGGASQEEF
YKFIKPILEKMDGTEELLVKLNREDLLRKQRTFDNGSIPHQIHLGELHAILRRQEDFYPFLK
DNREKIEKILTFRIPYYVGPLARGNSRFAWMTRKSEETITPWNFEEVVDKGASAQSFIERMT
NFDKNLPNEKVLPKHSLLYEYFTVYNELTKVKYVTEGMRKPAFLSGEQKKAIVDLLFKTNRK
VTVKQLKEDYFKKIECFDSVEISGVEDRFNASLGTYHDLLKIIKDKDFLDNEENEDILEDIV
LTLTLFEDREMIEERLKTYAHLFDDKVMKQLKRRRYTGWGRLSRKLINGIRDKQSGKTILDF
LKSDGFANRNFMQLIHDDSLTFKEDIQKAQVSGQGDSLHEHIANLAGSPAIKKGILQTVKVV
DELVKVMGRHKPENIVIEMARENQTTQKGQKNSRERMKRIEEGIKELGSQILKEHPVENTQL
QNEKLYLYYLQNGRDMYVDQELDINRLSDYDVDHIVPQSFLKDDSIDNKVLTRSDKNRGKSD
NVPSEEVVKKMKNYWRQLLNAKLITQRKFDNLTKAERGGLSELDKAGFIKRQLVETRQITKH
VAQILDSRMNTKYDENDKLIREVKVITLKSKLVSDFRKDFQFYKVREINNYHHAHDAYLNAV
VGTALIKKYPKLESEFVYGDYKVYDVRKMIAKSEQEIGKATAKYFFYSNIMNFFKTEITLAN
GEIRKRPLIETNGETGEIVWDKGRDFATVRKVLSMPQVNIVKKTEVQTGGFSKESILPKRNS
DKLIARKKDWDPKKYGGFDSPTVAYSVLVVAKVEKGKSKKLKSVKELLGITIMERSSFEKNP
IDFLEAKGYKEVKKDLIIKLPKYSLFELENGRKRMLASAGELQKGNELALPSKYVNFLYLAS
HYEKLKGSPEDNEQKQLFVEQHKHYLDEIIEQISEFSKRVILADANLDKVLSAYNKHRDKPI
REQAENIIHLFTLTNLGAPAAFKYFDTTIDRKRYTSTKEVLDATLIHQSITGLYETRIDLSQ
LGGD

(single underline: HNH domain; double underline: RuvC domain; (Cas9 reference sequence), or a corresponding region thereof

[0019] In some embodiments, the Cas9 polypeptide comprises a deletion of amino acids 1017-1069 as numbered in the Cas9 polypeptide reference sequence or corresponding amino acids thereof the Cas9 polypeptide comprises a deletion of amino acids 792-872 as numbered in the Cas9 polypeptide reference sequence or corresponding amino acids thereof; or the Cas9 polypeptide comprises a deletion of amino acids 792-906 as numbered in the Cas9 polypeptide reference sequence or corresponding amino acids thereof. In some embodiments, the adenosine deaminase variant is inserted within a flexible loop of the Cas9 polypeptide. In some embodiments, the flexible loop comprises a region selected from the group consisting of amino acid residues at positions 530-537, 569-579, 686-691, 768-793, 943-947, 1002-1040, 1052-1077, 1232-1248, and 1298-1300 as numbered in the Cas9 reference sequence, or corresponding amino acid positions thereof. In some embodiments, the deaminase is inserted between amino acid positions 768-769, 791-792, 792-793, 1015-1016, 1022-1023, 1026-1027, 1029-1030, 1040-1041, 1052-1053, 1054-1055, 1067-1068, 1068-1069, 1247-1248, or 1248-1249 as numbered in the Cas9 reference sequence, or corresponding amino acid positions thereof. In some embodiments, the deaminase is inserted between amino acid positions 768-769, 792-793, 1022-1023, 1026-1027, 1040-1041, 1068-1069, or 1247-1248 as numbered in the Cas9 reference sequence or corresponding amino acid positions thereof. In some embodiments, the deaminase is inserted between amino acid positions 1016-1017, 1023-1024, 1029-1030, 1040-1041, 1069-1070, or 1247-1248 as numbered in the Cas9 reference sequence or corresponding amino acid positions thereof. In some embodiments, the adenosine deaminase variant is inserted within the Cas9 polypeptide at the loci identified in Table 10A. In some embodiments, the N-terminal fragment comprises amino acid residues 1-529, 538-568, 580-685, 692-942, 948-1001, 1026-1051, 1078-1231, and/or 1248-1297 of the Cas9 reference sequence, or corresponding residues thereof. In some embodiments, the C-terminal fragment comprises amino acid residues 1301-1368, 1248-1297, 1078-1231, 1026-1051, 948-1001, 692-942, 580-685, and/or 538-568 of the Cas9 reference sequence, or corresponding residues thereof.

[0020] In some embodiments, the Cas9 polypeptide is a nickase or wherein the Cas9 polypeptide is nuclease inactive. In some embodiments, the Cas9 polypeptide is a modified SpCas9 and has specificity for an altered PAM or specificity for a non-G PAM. In some embodiments, the modified SpCas9 polypeptide includes amino acid substitutions D1135M, S1136Q, G1218K, E1219F, A1322R, D1332A, R1335E, and T1337R (SpCas9-MQKFRAER) and has specificity for the altered PAM 5′-NGC-3′.

[0021] In various embodiments, the polynucleotide programmable DNA binding domain is a modified Streptococcus pyogenes Cas9 (SpCas9), or variants thereof. In various embodiments of the above aspects or any other aspect of the invention delineated herein, the polynucleotide programmable DNA binding domain comprises a modified SpCas9 having an altered protospacer-adjacent motif (PAM) specificity or specificity for a non-G PAM. In one embodiment, the modified SpCas9 has specificity for the nucleic acid sequences 5′-NGA-3′. In one embodiment, the modified SpCas9 has specificity for the nucleic acid sequence 5′-AGA-3′ or 5′-GGA-3′. In one embodiment, the modified SpCas9 has specificity for an NGA PAM variant.

[0022] In various embodiments, the polynucleotide programmable DNA binding domain is a Staphylococcus aureus Cas9 (SaCas9) or variant thereof. In one embodiment, the SaCas9 has specificity for the nucleic acid sequence 5′-NNGRRT-3′. In one embodiment, the

[0023] SaCas9 has specificity for the nucleic acid sequence 5′-GAGAAT-3′. In one embodiment, the SaCas9 has specificity for an NNGRRT PAM variant.

[0024] In various embodiments, the polynucleotide programmable DNA binding domain is a Cas12 polypeptide. In one embodiment, the adenosine deaminase variant is inserted in a Cas12 polypeptide. In one embodiment, the Cas12 polypeptide is Cas12a, Cas12b, Cas12c, Cas12d, Cas12e, Cas12g, Cas12h, or Cas12i. In one embodiment, the adenosine deaminase variant is inserted between amino acid positions: a) 153-154, 255-256, 306-307, 980-981, 1019-1020, 534-535, 604-605, or 344-345 of BhCas12b or a corresponding amino acid residue of Cas12a, Cas12c, Cas12d, Cas12e, Cas12g, Cas12h, or Cas12i; b) 147 and 148, 248 and 249, 299 and 300, 991 and 992, or 1031 and 1032 of BvCas12b or a corresponding amino acid residue of Cas12a, Cas12c, Cas12d, Cas12e, Cas12g, Cas12h, or Cas12i; or c) 157 and 158, 258 and 259, 310 and 311, 1008 and 1009, or 1044 and 1045 of AaCas12b or a corresponding amino acid residue of Cas12a, Cas12c, Cas12d, Cas12e, Cas12g, Cas12h, or Cas12i. In one embodiment, the adenosine deaminase variant is inserted within the Cas12 polypeptide at the loci identified in Table 10B. In one embodiment, the Cas12 polypeptide is Cas12b. In one embodiment, the Cas12 polypeptide comprises a BhCas12b domain, a BvCas12b domain, or an AACas12b domain.

[0025] In various embodiments the polynucleotide programmable DNA binding domain is a nuclease inactive variant. In other embodiments, the polynucleotide programmable DNA binding domain is a nickase variant. In one embodiment, the nickase variant comprises an amino acid substitution D10A or a corresponding amino acid substitution thereof. In some embodiments, the adenosine deaminase domain is capable of deaminating adenosine in deoxyribonucleic acid (DNA). In some embodiments, the adenosine deaminase domain is a monomer comprising an adenosine deaminase variant. In some embodiments, the adenosine deaminase domain is a heterodimer comprising a wild-type adenosine deaminase domain and an adenosine deaminase variant.

[0026] In some embodiments, the adenosine deaminase variant comprises the amino acid sequence: MSEVEFSHEYWMRHALTLAKRARDEREVPVGAVLVLNNRVIGEGWNRAIGLHDPTAHAEIMA LRQGGLVMQNYRLIDATLYVTFEPCVMCAGAMIHSRIGRVVFGVRNAKTGAAGSLMDVLHYP GMNHRVEITEGILADECAALLCYFFRMPRQVFNAQKKAQSSTD; wherein the amino acid sequence comprises at least one alteration. In some embodiments, the adenosine deaminase variant comprises alterations at amino acid position 82 and/or 166, relative to the sequence above. In some embodiments, the at least one alteration comprises: V82S, Y147T, Y147R,

[0027] Q154S, Y123H, and/or Q154R, relative to the sequence above. In some embodiments, the at least one alteration comprises a combination of alterations selected from the group consisting of: Y147T+Q154R; Y147T+Q154S; Y147R+Q154S; V82S+Q154S; V82S+Y147R; V82S+Q154R; V82S+Y123H; I76Y+V82S; V82S+Y123H+Y147T; V82S+Y123H+Y147R; V82S+Y123H+Q154R; Y147R+Q154R+Y123H; Y147R+Q154R+I76Y; Y147R+Q154R+T166R; Y123H+Y147R+Q154R+I76Y; V82S+Y123H+Y147R+Q154R; and I76Y+V82S+Y123H+Y147R+Q154R. In some embodiments, the at least one alteration is Y147T+Q154S, relative to the sequence above.

[0028] In some embodiments, the adenosine deaminase variant comprises a deletion of the C terminus beginning at a residue selected from the group consisting of 149, 150, 151, 152, 153, 154, 155, 156, and 157. In some embodiments, the adenosine deaminase variant is an adenosine deaminase monomer comprising a TadA*8 adenosine deaminase variant domain. In some embodiments, the adenosine deaminase variant is an adenosine deaminase heterodimer comprising a wild-type adenosine deaminase domain and a TadA*8 adenosine deaminase variant domain. In some embodiments, the adenosine deaminase variant is an adenosine deaminase heterodimer comprising a TadA domain and a TadA*8 adenosine deaminase variant domain.

[0029] In some embodiments, the guide polynucleotide comprises a nucleic acid sequence selected from the group of:

a) GACCUAGGCGAGGCAGUAGG;
b) CCAGUAUGGACACUGUCCAAA;
c) CAGUAUGGACACUGUCCAAA;
and
d) AGUAUGGACACUGUCCAAAG.

In some embodiments, the one or more guide RNAs comprises a CRISPR RNA (crRNA) and a trans-encoded small RNA (tracrRNA), wherein the crRNA comprises a nucleic acid sequence complementary to a G6PC nucleic acid sequence comprising the SNP associated with GSD1a. In some embodiments, the Adenosine Deaminase Base Editor 8 (ABE8) is in complex with a single guide RNA (sgRNA) comprising a nucleic acid sequence complementary to an G6PC nucleic acid sequence comprising the SNP associated with GSD1a.

[0030] In some embodiments, the adenosine deaminase is a TadA deaminase. In one embodiment, the TadA deaminase is a TadA*8 variant. In some embodiments, the TadA*8 variant is selected from the group consisting of: TadA*8.1, TadA*8.2, TadA*8.3, TadA*8.4, TadA*8.5, TadA*8.6, TadA*8.7, TadA*8.8, TadA*8.9, TadA*8.10, TadA*8.11, TadA*8.12, TadA*8.13, TadA*8.14, TadA*8.15, TadA*8.16, TadA*8.17, TadA*8.18, TadA*8.19, TadA*8.20, TadA*8.21, TadA*8.22, TadA*8.23, TadA*8.24. In some embodiments, the Adenosine Deaminase Base Editor 8 (ABE8) is selected from the group consisting of: ABE8.1-m, ABE8.2-m, ABE8.3-m, ABE8.4-m, ABE8.5-m, ABE8.6-m, ABE8.?-m, ABE8.8-m, ABE8.9-m, ABE8.10-m, ABE8.11-m, ABE8.12-m, ABE8.13-m, ABE8.14-m, ABE8.15-m, ABE8.16-m, ABE8.17-m, ABE8.18-m, ABE8.19-m, ABE8.20-m, ABE8.21-m, ABE8.22-m, ABE8.23-m, ABE8.24-m, ABE8.1-d, ABE8.2-d, ABE8.3-d, ABE8.4-d, ABE8.5-d, ABE8.6-d, ABE8.7-d, ABE8.8-d, ABE8.9-d, ABE8.10-d, ABE8.11-d, ABE8.12-d, ABE8.13-d, ABE8.14-d, ABE8.15-d, ABE8.16-d, ABE8.17-d, ABE8.18-d, ABE8.19-d, ABE8.20-d, ABE8.21-d, ABE8.22-d, ABE8.23-d, or ABE8.24-d.

[0031] In some embodiments, the Adenosine Deaminase Base Editor 8 (ABE8) comprises or consists essentially of the following sequence or a fragment thereof having adenosine deaminase activity:

MSEVEFSHEYWMRHALTLAKRARDEREVPVGAVLVLNNRVIGEGWNRAIGL
HDPTAHAEIMALRQGGLVMQNYRLIDATLYVTFEPCVMCAGAMIHSRIGRV
VFGVRNAKTGAAGSLMDVLHYPGMNHRVEITEGILADECAALLCTFFRMPR
QVFNAQKKAQSSTD.

[0032] In some embodiments, the gRNA comprises a scaffold having the following sequence:

GUUUUAGAGCUAGAAAUAGCAAGUUAAAAUAAGGCUAGUCCGUUAUCAACU
UGAAAAAGUGGCACCGAGUCGGUGCUUUU.

[0033] In some embodiments, the gRNA comprises a scaffold having the following sequence:

GUUUUAGUACUCUGUAAUGAAAAUUACAGAAUCUACUAAAACAAGGCAAAA
UGCCGUGUUUAUCUCGUCAACUUGUUGGCGAGAUUUU.

[0034] In an aspect, provided herein is a base editor comprising an Adenosine Deaminase Base Editor 8 (ABE8) in a complex with one or more guide polynucleotides, wherein the Adenosine Deaminase Base Editor 8 (ABE8) comprises a polynucleotide programmable DNA binding domain and an adenosine deaminase domain, and wherein one or more of said guide polynucleotides target said base editor to effect an A•T to G•C alteration of the SNP associated with GSD1a. In some embodiments, the adenosine deaminase variant comprises a V82S alteration and/or a T166R alteration. In some embodiments, the adenosine deaminase variant further comprises one or more of the following alterations: Y147T, Y147R, Q154S, Y123H, and Q154R. In some embodiments, the base editor domain comprises an adenosine deaminase heterodimer comprising a wild-type adenosine deaminase domain and an adenosine deaminase variant. In some embodiments, the adenosine deaminase variant is a truncated TadA8 that is missing 1, 2, 3, 4, 5 ,6, 7, 8, 9, 10, 11, 12, 13, 14, 15, 6, 17, 18, 19, or 20 N-terminal amino acid residues relative to the full length TadA8. In some embodiments, the adenosine deaminase variant is a truncated TadA8 that is missing 1, 2, 3, 4, 5 ,6, 7, 8, 9, 10, 11, 12, 13, 14, 15, 6, 17, 18, 19, or 20 C-terminal amino acid residues relative to the full length TadA8. In some embodiments, the polynucleotide programmable DNA binding domain is a modified Staphylococcus aureus Cas9 (SaCas9), Streptococcus thermophilus 1 Cas9 (St1Cas9), a modified Streptococcus pyogenes Cas9 (SpCas9), or variants thereof. In some embodiments, the polynucleotide programmable DNA binding domain is a variant of SpCas9 having an altered protospacer-adjacent motif (PAM) specificity or specificity for a non-G PAM. In some embodiments, the polynucleotide programmable DNA binding domain is a nuclease inactive Cas9. In some embodiments, the polynucleotide programmable DNA binding domain is a Cas9 nickase.

[0035] In one aspect, provided herein is a base editor system comprising one or more guide RNAs and a fusion protein comprising a polynucleotide programmable DNA binding domain comprising the following sequence:

EIGKATAKYFFYSNIMNFFKTEITLANGEIRKRPLIETNGETGEIVWDK
GRDFATVRKVLSMPQVNIVKKTEVQTGGFSKESILPKRNSDKLIARKKD
WDPKKYGGFMQPTVAYSVLVVAKVEKGKSKKLKSVKELLGITIMERSSF
EKNPIDFLEAKGYKEVKKDLIIKLPKYSLFELENGRKRMLASAKFLQKG
NELALPSKYVNFLYLASHYEKLKGSPEDNEQKQLFVEQHKHYLDEIIEQ
ISEFSKRVILADANLDKVLSAYNKHRDKPIREQAENIIHLFTLTNLGAP
RAFKYFDTTIARKEYRSTKEVLDATLIHQSITGLYETRIDLSQLGGDGG
SGGSGGSGGSGGSGGSGGMDKKYSIGLAIGTNSVGWAVITDEYKVPSKK
FKVLGNTDRHSIKKNLIGALLFDSGETAEATRLKRTARRRYTRRKNRIC
YLQEIFSNEMAKVDDSFFHRLEESFLVEEDKKHERHPIFGNIVDEVAYH
EKYPTIYHLRKKLVDSTDKADLRLIYLALAHMIKFRGHFLIEGDLNPDN
SDVDKLFIQLVQTYNQLFEENPINASGVDAKAILSARLSKSRRLENLIA
QLPGEKKNGLFGNLIALSLGLTPNFKSNFDLAEDAKLQLSKDTYDDDLD
NLLAQIGDQYADLFLAAKNLSDAILLSDILRVNTEITKAPLSASMIKRY
DEHHQDLTLLKALVRQQLPEKYKEIFFDQSKNGYAGYIDGGASQEEFYK
FIKPILEKMDGTEELLVKLNREDLLRKQRTFDNGSIPHQIHLGELHAIL
RRQEDFYPFLKDNREKIEKILTFRIPYYVGPLARGNSRFAWMTRKSEET
ITPWNFEEVVDKGASAQSFIERMTNFDKNLPNEKVLPKHSLLYEYFTVY
NELTKVKYVTEGMRKPAFLSGEQKKAIVDLLFKTNRKVTVKQLKEDYFK
KIECFDSVETSGVEDRFNASLGTYHDLLKIIKDKDFLDNEENEDILEDI
VLTLTLFEDREMIEERLKTYAHLFDDKVMKQLKRRRYTGWGRLSRKLIN
GIRDKQSGKTILDFLKSDGFANRNFMQLIHDDSLTFKEDIQKAQVSGQG
DSLHEHIANLAGSPAIKKGILQTVKVVDELVKVMGRHKPENIVIEMARE
NQTTQKGQKNSRERMKRIEEGIKELGSQILKEHPVENTQLQNEKLYLYY
LQNGRDMYVDQELDINRLSDYDVDHIVPQSFLKDDSIDNKVLTRSDKNR
GKSDNVPSEEVVKKMKNYWRQLLNAKLITQRKFDNLTKAERGGLSELDK
AGFIKRQLVETRQITKHVAQILDSRMNTKYDENDKLIREVKVITLKSKL
VSDFRKDFQFYKVREINNYHHAHDAYLNAVVGTALIKKYPKLESEFVYG
DYKVYDVRKMIAKSEQEGADKRTADGSEFESPKKKRKV*,

wherein the bold sequence indicates sequence derived from Cas9, the italics sequence denotes a linker sequence, and the underlined sequence denotes a bipartite nuclear localization sequence, and at least one base editor domain comprising an adenosine deaminase variant comprising an alteration at amino acid position 82 and/or 166 of MSEVEFSHEYWMRHALTLAKRARDEREVPVGAVLVLNNRVIGEGWNRAIGLHDPT AHAEIMALRQGGLVMQNYRLIDATLYVTFEPCVMCAGAMIHSRIGRVVFGVRNAKT GAAGSLMDVLHYPGMNHRVEITEGILADECAALLCYFFRMPRQVFNAQKKAQSSTD, and wherein one or more of said guide polynucleotides target said base editor to effect an A•T to G•C alteration of the SNP associated with GSD1a.

[0036] In an aspect, a cell comprising any one of the above delineated base editor systems is provided. In some embodiments, the cell is a human cell or a mammalian cell. In some embodiments, the cell is ex vivo, in vivo, or in vitro.

[0037] The description and examples herein illustrate embodiments of the present disclosure in detail. It is to be understood that this disclosure is not limited to the particular embodiments described herein and as such can vary. Those of skill in the art will recognize that there are numerous variations and modifications of this disclosure, which are encompassed within its scope.

[0038] The practice of some embodiments disclosed herein employ, unless otherwise indicated, conventional techniques of immunology, biochemistry, chemistry, molecular biology, microbiology, cell biology, genomics and recombinant DNA, which are within the skill of the art. See for example Sambrook and Green, Molecular Cloning: A Laboratory Manual, 4th Edition (2012); the series Current Protocols in Molecular Biology (F. M. Ausubel, et al. eds.); the series Methods In Enzymology (Academic Press, Inc.), PCR 2: A Practical Approach (M. J. MacPherson, B. D. Hames and G. R. Taylor eds. (1995)), Harlow and Lane, eds. (1988) Antibodies, A Laboratory Manual, and Culture of Animal Cells: A Manual of Basic Technique and Specialized Applications, 6th Edition (R. I. Freshney, ed. (2010)).

[0039] Although various features of the present disclosure can be described in the context of a single embodiment, the features can also be provided separately or in any suitable combination. Conversely, although the present disclosure can be described herein in the context of separate embodiments for clarity, the present disclosure can also be implemented in a single embodiment. The section headings used herein are for organizational purposes only and are not to be construed as limiting the subject matter described.

[0040] The features of the present disclosure are set forth with particularity in the appended claims. A better understanding of the features and advantages of the present will be obtained by reference to the following detailed description that sets forth illustrative embodiments, in which the principles of the disclosure are utilized, and in view of the accompanying drawings as described hereinbelow.

### Definitions

[0041] The following definitions supplement those in the art and are directed to the current application and are not to be imputed to any related or unrelated case, e.g., to any commonly owned patent or application. Although any methods and materials similar or equivalent to those described herein can be used in the practice for testing of the present disclosure, the preferred materials and methods are described herein. Accordingly, the terminology used herein is for the purpose of describing particular embodiments only, and is not intended to be limiting.

[0042] Unless defined otherwise, all technical and scientific terms as used herein have the meaning commonly understood by a person skilled in the art to which this invention belongs. The following references provide one of skill with a general definition of many of the terms used in this invention: Singleton et al., Dictionary of Microbiology and Molecular Biology (2nd ed. 1994); The Cambridge Dictionary of Science and Technology (Walker ed., 1988); The Glossary of Genetics, 5th Ed., R. Rieger et al. (eds.), Springer Verlag (1991); and Hale & Marham, The Harper Collins Dictionary of Biology (1991).

[0043] In this application, the use of the singular includes the plural unless specifically stated otherwise. It must be noted that, as used in the specification, the singular forms “a,” “an,” and “the” include plural references unless the context clearly dictates otherwise. In this application, the use of “or” means “and/or,” unless stated otherwise, and is understood to be inclusive. Furthermore, use of the term “including” as well as other forms, such as “include,” “includes,” and “included,” is not limiting.

[0044] As used in this specification and claim(s), the words “comprising” (and any form of comprising, such as “comprise” and “comprises”), “having” (and any form of having, such as “have” and “has”), “including” (and any form of including, such as “includes” and “include”) or “containing” (and any form of containing, such as “contains” and “contain”) are inclusive or open-ended and do not exclude additional, unrecited elements or method steps. It is contemplated that any embodiment discussed in this specification can be implemented with respect to any method or composition of the present disclosure, and vice versa. Furthermore, compositions of the present disclosure can be used to achieve methods of the present disclosure.

[0045] The term “about” or “approximately” means within an acceptable error range for the particular value as determined by one of ordinary skill in the art, which will depend in part on how the value is measured or determined, i.e., the limitations of the measurement system. For example, “about” can mean within 1 or more than 1 standard deviation, per the practice in the art. Alternatively, “about” can mean a range of up to 20%, up to 10%, up to 5%, or up to 1% of a given value. Alternatively, particularly with respect to biological systems or processes, the term can mean within an order of magnitude, such as within 5-fold or within 2-fold, of a value. Where particular values are described in the application and claims, unless otherwise stated the term “about” meaning within an acceptable error range for the particular value should be assumed.

[0046] Ranges provided herein are understood to be shorthand for all of the values within the range. For example, a range of 1 to 50 is understood to include any number, combination of numbers, or sub-range from the group consisting 1, 2, 3, 4, 5, 6, 7, 8, 9, 10, 11, 12, 13, 14, 15, 16, 17, 18, 19, 20, 21, 22, 23, 24, 25, 26, 27, 28, 29, 30, 31, 32, 33, 34, 35, 36, 37, 38, 39, 40, 41, 42, 43, 44, 45, 46, 47, 48, 49, or 50.

[0047] Reference in the specification to “some embodiments,” “an embodiment,” “one embodiment” or “other embodiments” means that a particular feature, structure, or characteristic described in connection with the embodiments is included in at least some embodiments, but not necessarily all embodiments, of the present disclosures.

[0048] By “adenosine deaminase” is meant a polypeptide or fragment thereof capable of catalyzing the hydrolytic deamination of adenine or adenosine. In some embodiments, the deaminase or deaminase domain is an adenosine deaminase catalyzing the hydrolytic deamination of adenosine to inosine or deoxy adenosine to deoxyinosine. In some embodiments, the adenosine deaminase catalyzes the hydrolytic deamination of adenine or adenosine in deoxyribonucleic acid (DNA). The adenosine deaminases (e.g., engineered adenosine deaminases, evolved adenosine deaminases) provided herein may be from any organism, such as a bacterium.

[0049] In some embodiments, the adenosine deaminase is a TadA deaminase. In some embodiments, the TadA deaminase is TadA variant. In some embodiments, the TadA variant is a TadA*8. In some embodiments, the deaminase or deaminase domain is a variant of a naturally occurring deaminase from an organism, such as a human, chimpanzee, gorilla, monkey, cow, dog, rat, or mouse. In some embodiments, the deaminase or deaminase domain does not occur in nature. For example, in some embodiments, the deaminase or deaminase domain is at least 50%, at least 55%, at least 60%, at least 65%, at least 70%, at least 75% at least 80%, at least 85%, at least 90%, at least 91%, at least 92%, at least 93%, at least 94%, at least 95%, at least 96%, at least 97%, at least 98%, at least 99%, at least 99.1%, at least 99.2%, at least 99.3%, at least 99.4%, at least 99.5%, at least 99.6%, at least 99.7%, at least 99.8%, or at least 99.9% identical to a naturally occurring deaminase. For example, deaminase domains are described in International PCT Application Nos. PCT/2017/045381 (WO 2018/027078) and PCT/US2016/058344 (WO 2017/070632), each of which is incorporated herein by reference for its entirety. Also, see Komor, A. C., et al., “Programmable editing of a target base in genomic DNA without double-stranded DNA cleavage” Nature 533, 420-424 (2016); Gaudelli, N. M., et al., “Programmable base editing of A•T to G•C in genomic DNA without DNA cleavage” Nature 551, 464-471 (2017); Komor, A. C., et al., “Improved base excision repair inhibition and bacteriophage Mu Gam protein yields C:G-to-T:A base editors with higher efficiency and product purity” Science Advances 3:eaao4774 (2017)), and Rees, H. A., et al., “Base editing: precision chemistry on the genome and transcriptome of living cells.” Nat Rev Genet. 2018 December; 19(12):770-788. doi: 10.1038/s41576-018-0059-1, the entire contents of which are hereby incorporated by reference.

[0050] A wild type TadA(wt) adenosine deaminase has the following sequence (also termed TadA reference sequence):

MSEVEFSHEYWMRHALTLAKRAWDEREVPVGAVLVHNNRVIGEGWNRPIGR
HDPTAHAEIMALRQGGLVMQNYRLIDATLYVTLEPCVMCAGAMIHSRIGRV
VFGARDAKTGAAGSLMDVLHHPGMNHRVEITEGILADECAALLSDFFRMRR
QEIKAQKKAQSSTD

[0051] In some embodiments, the adenosine deaminase comprises an alteration in the following sequence:

MSEVEFSHEY WMRHALTLAK RARDEREVPV GAVLVLNNRV
IGEGWNRAIG LHDPTAHAEI MALRQGGLVM QNYRLIDATL
YVTFEPCVMC AGAMIHSRIG RVVFGVRNAK TGAAGSLMDV
LHYPGMNHRV EITEGILADE CAALLCYFFR MPRQVFNAQK KAQSSTD
(also termed TadA*7.10).

[0052] In some embodiments, TadA*7.10 comprises at least one alteration. In some embodiments, TadA*7.10 comprises an alteration at amino acid 82 and/or 166. In particular embodiments, a variant of the above-referenced sequence comprises one or more of the following alterations: Y147T, Y147R, Q154S, Y123H, V82S, T166R, and/or Q154R. The alteration Y123H is also referred to herein as H123H (the alteration H123Y in TadA*7.10 reverted back to Y123H (wt)). In other embodiments, a variant of the TadA*7.10 sequence comprises a combination of alterations selected from the group of: Y147T+Q154R; Y147T+Q154S; Y147R+Q154S; V82S+Q154S; V82S+Y147R; V82S+Q154R; V82S+Y123H; I76Y+V82S; V82S+Y123H+Y147T; V82S+Y123H+Y147R; V82S+Y123H+Q154R; Y147R+Q154R+Y123H; Y147R+Q154R+I76Y; Y147R+Q154R+T166R; Y123H+Y147R+Q154R+I76Y; V82S+Y123H+Y147R+Q154R; and I76Y+V82S+Y123H+Y147R+Q154R.

[0053] In other embodiments, the invention provides adenosine deaminase variants that include deletions, e.g., TadA*8, comprising a deletion of the C terminus beginning at residue 149, 150, 151, 152, 153, 154, 155, 156, or 157, relative to TadA*7.10, the TadA reference sequence, or a corresponding mutation in another TadA. In other embodiments, the adenosine deaminase variant is a TadA (e.g., TadA*8) monomer comprising one or more of the following alterations: Y147T, Y147R, Q154S, Y123H, V82S, T166R, and/or Q154R, relative to TadA*7.10, the TadA reference sequence, or a corresponding mutation in another TadA. In other embodiments, the adenosine deaminase variant is a monomer comprising a combination of alterations selected from the group of: Y147T+Q154R; Y147T+Q154S; Y147R+Q154S; V82S+Q154S; V82S+Y147R; V82S+Q154R; V82S+Y123H; I76Y+V82S; V82S+Y123H+Y147T; V82S+Y123H+Y147R; V82S+Y123H+Q154R; Y147R+Q154R+Y123H; Y147R+Q154R+I76Y; Y147R+Q154R+T166R; Y123H+Y147R+Q154R+I76Y; V82S+Y123H+Y147R+Q154R; and I76Y+V82S+Y123H+Y147R+Q154R, relative to TadA*7.10, the TadA reference sequence, or a corresponding mutation in another TadA.

[0054] In still other embodiments, the adenosine deaminase variant is a homodimer comprising two adenosine deaminase domains (e.g., TadA*8) each having one or more of the following alterations Y147T, Y147R, Q154S, Y123H, V82S, T166R, and/or Q154R, relative to TadA*7.10, the TadA reference sequence, or a corresponding mutation in another TadA. In other embodiments, the adenosine deaminase variant is a homodimer comprising two adenosine deaminase domains (e.g., TadA*8) each having a combination of alterations selected from the group of: Y147T+Q154R; Y147T+Q154S; Y147R+Q154S; V82S+Q154S; V82S+Y147R; V82S+Q154R; V82S+Y123H; I76Y+V82S; V82S+Y123H+Y147T; V82S+Y123H+Y147R; V82S+Y123H+Q154R; Y147R+Q154R+Y123H; Y147R+Q154R+I76Y; Y147R+Q154R+T166R; Y123H+Y147R+Q154R+I76Y; V82S+Y123H+Y147R+Q154R; and I76Y+V82S+Y123H+Y147R+Q154R, relative to TadA*7.10, the TadA reference sequence, or a corresponding mutation in another TadA.

[0055] In other embodiments, the adenosine deaminase variant is a heterodimer comprising a wild-type TadA adenosine deaminase domain and an adenosine deaminase variant domain (e.g., TadA*8) comprising one or more of the following alterations Y147T, Y147R, Q154S, Y123H, V82S, T166R, and/or Q154R, relative to TadA*7.10, the TadA reference sequence, or a corresponding mutation in another TadA. In other embodiments, the adenosine deaminase variant is a heterodimer comprising a wild-type TadA adenosine deaminase domain and an adenosine deaminase variant domain (e.g. TadA*8) comprising a combination of alterations selected from the group of: Y147T+Q154R; Y147T+Q154S; Y147R+Q154S; V82S+Q154S; V82S+Y147R; V82S+Q154R; V82S+Y123H; I76Y+V82S; V82S+Y123H+Y147T; V82S+Y123H+Y147R; V82S+Y123H+Q154R; Y147R+Q154R+Y123H; Y147R+Q154R+I76Y; Y147R+Q154R+T166R; Y123H+Y147R+Q154R+I76Y; V82S+Y123H+Y147R+Q154R; and I76Y+V82S+Y123H+Y147R+Q154R, relative to TadA*7.10, the TadA reference sequence, or a corresponding mutation in another TadA.

[0056] In other embodiments, the adenosine deaminase variant is a heterodimer comprising a TadA*7.10 domain and an adenosine deaminase variant domain (e.g., TadA*8) comprising one or more of the following alterations Y147T, Y147R, Q154S, Y123H, V82S, T166R, and/or Q154R, relative to TadA*7.10, the TadA reference sequence, or a corresponding mutation in another TadA. In other embodiments, the adenosine deaminase variant is a heterodimer comprising a TadA*7.10 domain and an adenosine deaminase variant domain (e.g. TadA*8) comprising a combination of the following alterations: Y147T+Q154R; Y147T+Q154S; Y147R+Q154S; V82S+Q154S; V82S+Y147R; V82S+Q154R; V82S+Y123H; I76Y+V82S; V82S+Y123H+Y147T; V82S+Y123H+Y147R; V82S+Y123H+Q154R; Y147R+Q154R+Y123H; Y147R+Q154R+I76Y; Y147R+Q154R+T166R; Y123H+Y147R+Q154R+I76Y; V82S+Y123H+Y147R+Q154R; or I76Y+V82S+Y123H+Y147R+Q154R, relative to TadA*7.10, the TadA reference sequence, or a corresponding mutation in another TadA.

[0057] In one embodiment, the adenosine deaminase is a TadA*8 that comprises or consists essentially of the following sequence or a fragment thereof having adenosine deaminase activity:

MSEVEFSHEYWMRHALTLAKRARDEREVPVGAVLVLNNRVIGEGWNRAIGL
HDPTAHAEIMALRQGGLVMQNYRLIDATLYVTFEPCVMCAGAMIHSRIGRV
VFGVRNAKTGAAGSLMDVLHYPGMNHRVEITEGILADECAALLCTFFRMPR
QVFNAQKKAQSSID.

[0058] In some embodiments, the TadA*8 is truncated. In some embodiments, the truncated TadA*8 is missing 1, 2, 3, 4, 5 ,6, 7, 8, 9, 10, 11, 12, 13, 14, 15, 6, 17, 18, 19, or 20 N-terminal amino acid residues relative to the full length TadA*8. In some embodiments, the truncated TadA*8 is missing 1, 2, 3, 4, 5 ,6, 7, 8, 9, 10, 11, 12, 13, 14, 15, 6, 17, 18, 19, or 20 C-terminal amino acid residues relative to the full length TadA*8. In some embodiments the adenosine deaminase variant is a full-length TadA*8.

[0059] In particular embodiments, an adenosine deaminase heterodimer comprises a TadA*8 domain and an adenosine deaminase domain selected from one of the following:

Staphylococcus aureus (S. aureus) TadA:
MGSHMTNDIYFMTLAIEEAKKAAQLGEVPIGAIITKDDEVIARAHNLRETL
QQPTAHAEHIAIERAAKVLGSWRLEGCTLYVTLEPCVMCAGTIVMSRIPRV
VYGADDPKGGCSGSLMNLLQQSNFNHRAIVDKGVLKEACSTLLTTFFKNLR
ANKKSTN
Bacillus subtilis (B. subtilis) TadA:
MTQDELYMKEAIKEAKKAEEKGEVPIGAVLVINGEIIARAHNLRETEQRSI
AHAEMLVIDEACKALGTWRLEGATLYVTLEPCPMCAGAVVLSRVEKVVFGA
FDPKGGCSGTLMNLLQEERFNHQAEVVSGVLEEECGGMLSAFFRELRKKKK
AARKNLSE
Salmonella typhimurium (S. typhimurium) TadA:
MPPAFITGVTSLSDVELDHEYWMRHALTLAKRAWDEREVPVGAVLVHNHRV
IGEGWNRPIGRHDPTAHAEIMALRQGGLVLQNYRLLDTTLYVTLEPCVMCA
GAMVHSRIGRVVFGARDAKTGAAGSLIDVLHHPGMNHRVEIIEGVLRDECA
TLLSDFFRMRRQEIKALKKADRAEGAGPAV
Shewanella putrefaciens (S. putrefaciens) TadA:
MDEYWMQVAMQMAEKAEAAGEVPVGAVLVKDGQQIATGYNLSISQHDPTAH
AEILCLRSAGKKLENYRLLDATLYITLEPCAMCAGAMVHSRIARVVYGARD
EKTGAAGTVVNLLQHPAFNHQVEVTSGVLAEACSAQLSRFFKRRRDEKKAL
KLAQRAQQGIE
Haemophilus influenzae F3031 (H. influenzae) TadA:
MDAAKVRSEFDEKMMRYALELADKAEALGEIPVGAVLVDDARNIIGEGWNL
SIVQSDPTAHAEIIALRNGAKNIQNYRLLNSTLYVTLEPCTMCAGAILHSR
IKRLVFGASDYKTGAIGSRFHFFDDYKMNHTLEITSGVLAEECSQKLSTFF
QKRREEKKIEKALLKSLSDK
Caulobacter crescentus (C. crescentus) TadA:
MRTDESEDQDHRMMRLALDAARAAAEAGETPVGAVILDPSTGEVIATAGNG
PIAAHDPTAHAEIAAMRAAAAKLGNYRLTDLTLVVTLEPCAMCAGAISHAR
IGRVVFGADDPKGGAVVHGPKFFAQPTCHWRPEVTGGVLADESADLLRGFF
RARRKAKI
Geobacter sulfurreducens (G. sulfurreducens) TadA:
MSSLKKTPIRDDAYWMGKAIREAAKAAARDEVPIGAVIVRDGAVIGRGHNL
REGSNDPSAHAEMIAIRQAARRSANWRLTGATLYVTLEPCLMCMGAIILAR
LERVVFGCYDPKGGAAGSLYDLSADPRLNHQVRLSPGVCQEECGTMLSDFF
RDLRRRKKAKATPALFIDERKVPPEP
TadA*7.10
MSEVEFSHEYWMRHALTLAKRARDEREVPVGAVLVLNNRVIGEGWNRAIGL
HDPTAHAEIMALRQGGLVMQNYRLIDATLYVTFEPCVMCAGAMIHSRIGRV
VFGVRNAKTGAAGSLMDVLHYPGMNHRVEITEGILADECAALLCYFFRMPR
QVFNAQKKAQSSTD

[0060] By “Adenosine Deaminase Base Editor 8 (ABE8) polypeptide” or “ABE8” is meant a base editor as defined herein comprising an adenosine deaminase variant comprising an alteration at amino acid position 82 and/or 166 of the following reference sequence:

MSEVEFSHEYWMRHALTLAKRARDEREVPVGAVLVLNNRVIGEGWNRAI
GLHDPTAHAEIMALRQGGLVMQNYRLIDATLYVTFEPCVMCAGAMIHSR
IGRVVFGVRNAKTGAAGSLMDVLHYPGMNHRVEITEGILADECAALLCY
FFRMPRQVFNAQKKAQSSTD

In some embodiments, ABE8 comprises further alterations, as described herein, relative to the reference sequence.

[0061] By “Adenosine Deaminase Base Editor 8 (ABE8) polynucleotide” is meant a polynucleotide encoding an ABE8.

[0062] “Administering” is referred to herein as providing one or more compositions described herein to a patient or a subject. By way of example and without limitation, composition administration, e.g., injection, can be performed by intravenous (i.v.) injection, sub-cutaneous (s.c.) injection, intradermal (i.d.) injection, intraperitoneal (i.p.) injection, or intramuscular (i.m.) injection. One or more such routes can be employed. Parenteral administration can be, for example, by bolus injection or by gradual perfusion over time. Alternatively, or concurrently, administration can be by the oral route.

[0063] By “agent” is meant any small molecule chemical compound, antibody, nucleic acid molecule, or polypeptide, or fragments thereof.

[0064] By “alteration” is meant a change (e.g. increase or decrease) in the structure, expression levels or activity of a gene or polypeptide as detected by standard art known methods such as those described herein. As used herein, an alteration includes a change in a polynucleotide or polypeptide sequence or a change in expression levels, such as a 25% change, a 40% change, a 50% change, or greater.

[0065] By “ameliorate” is meant decrease, suppress, attenuate, diminish, arrest, or stabilize the development or progression of a disease.

[0066] By “analog” is meant a molecule that is not identical, but has analogous functional or structural features. For example, a polynucleotide or polypeptide analog retains the biological activity of a corresponding naturally-occurring polynucleotide or polypeptide, while having certain modifications that enhance the analog's function relative to a naturally occurring polynucleotide or polypeptide. Such modifications could increase the analog's affinity for DNA, efficiency, specificity, protease or nuclease resistance, membrane permeability, and/or half-life, without altering, for example, ligand binding. An analog may include an unnatural nucleotide or amino acid.

[0067] By “base editor (BE)” or “nucleobase editor (NBE)” is meant an agent that binds a polynucleotide and has nucleobase modifying activity. In various embodiment, the base editor comprises a nucleobase modifying polypeptide (e.g., a deaminase) and a nucleic acid programmable nucleotide binding domain in conjunction with a guide polynucleotide (e.g., guide RNA). In various embodiments, the agent is a biomolecular complex comprising a protein domain having base editing activity, i.e., a domain capable of modifying a base (e.g., A, T, C, G, or U) within a nucleic acid molecule (e.g., DNA). In some embodiments, the polynucleotide programmable DNA binding domain is fused or linked to a deaminase domain. In one embodiment, the agent is a fusion protein comprising a domain having base editing activity. In another embodiment, the protein domain having base editing activity is linked to the guide RNA (e.g., via an RNA binding motif on the guide RNA and an RNA binding domain fused to the deaminase). In some embodiments, the domain having base editing activity is capable of deaminating a base within a nucleic acid molecule. In some embodiments, the base editor is capable of deaminating one or more bases within a DNA molecule. In some embodiments, the base editor is capable of deaminating an adenosine (A) within DNA. In some embodiments, the base editor is an adenosine base editor (ABE).

[0068] In some embodiments, base editors are generated (e.g. ABE8) by cloning an adenosine deaminase variant (e.g., TadA*8) into a scaffold that includes a circular permutant Cas9 (e.g., spCAS9 or saCAS9) and a bipartite nuclear localization sequence. Circular permutant Cas9s are known in the art and described, for example, in Oakes et al., Cell 176, 254-267, 2019. Exemplary circular permutants follow where the bold sequence indicates sequence derived from Cas9, the italics sequence denotes a linker sequence, and the underlined sequence denotes a bipartite nuclear localization sequence.

CPS (with MSP “NGC=Pam Variant with mutations Regular Cas9 likes NGG” PID=Protein Interacting Domain and “D10A” nickase):

EIGKATAKYFFYSNIMNFFKTEITLANGEIRKRPLIETNGETGEIVWDKGR
DFATVRKVLSMPQVNIVKKTEVQTGGFSKESILPKRNSDKLIARKKDWDPK
KYGGFMQPTVAYSVLVVAKVEKGKSKKLKSVKELLGITIMERSSFEKNPID
FLEAKGYKEVKKDLIIKLPKYSLFELENGRKRMLASAKFLQKGNELALPSK
YVNFLYLASHYEKLKGSPEDNEQKQLFVEQHKHYLDEIIEQISEFSKRVIL
ADANLDKVLSAYNKHRDKPIREQAENIIHLFTLTNLGAPRAFKYFDTTIAR
KEYRSTKEVLDATLIHQSITGLYETRIDLSQLGGDGGSGGSGGSGGSGGSG
GSGGMDKKYSIGLAIGTNSVGWAVITDEYKVPSKKFKVLGNTDRHSIKKNL
IGALLFDSGETAEATRLKRTARRRYTRRKNRICYLQEIFSNEMAKVDDSFF
HRLEESFLVEEDKKHERHPIFGNIVDEVAYHEKYPTIYHLRKKLVDSTDKA
DLRLIYLALAHMIKFRGHFLIEGDLNPDNSDVDKLFIQLVQTYNQLFEENP
INASGVDAKAILSARLSKSRRLENLIAQLPGEKKNGLFGNLIALSLGLTPN
FKSNFDLAEDAKLQLSKDTYDDDLDNLLAQIGDQYADLFLAAKNLSDAILL
SDILRVNTEITKAPLSASMIKRYDEHHQDLTLLKALVRQQLPEKYKEIFFD
QSKNGYAGYIDGGASQEEFYKFIKPILEKMDGTEELLVKLNREDLLRKQRT
FDNGSIPHQIHLGELHAILRRQEDFYPFLKDNREKIEKILTFRIPYYVGPL
ARGNSRFAWMTRKSEETITPWNFEEVVDKGASAQSFIERMTNFDKNLPNEK
VLPKHSLLYEYFTVYNELTKVKYVTEGMRKPAFLSGEQKKAIVDLLFKTNR
KVTVKQLKEDYFKKIECFDSVEISGVEDRFNASLGTYHDLLKIIKDKDFLD
NEENEDILEDIVLTLTLFEDREMIEERLKTYAHLFDDKVMKQLKRRRYTGW
GRLSRKLINGIRDKQSGKTILDFLKSDGFANRNFMQLIHDDSLTFKEDIQK
AQVSGQGDSLHEHIANLAGSPAIKKGILQTVKVVDELVKVMGRHKPENIVI
EMARENQTTQKGQKNSRERMKRIEEGIKELGSQILKEHPVENTQLQNEKLY
LYYLQNGRDMYVDQELDINRLSDYDVDHIVPQSFLKDDSIDNKVLTRSDKN
RGKSDNVPSEEVVKKMKNYWRQLLNAKLITQRKFDNLTKAERGGLSELDKA
GFIKRQLVETRQITKHVAQILDSRMNTKYDENDKLIREVKVITLKSKLVSD
FRKDFQFYKVREINNYHHAHDAYLNAVVGTALIKKYPKLESEFVYGDYKVY
DVRKMIAKSEQEGADKRTADGSEFESPKKKRKV*

[0069] In some embodiments, the ABE8 is selected from a base editor from Table 7 or 9 infra. In some embodiments, ABE8 contains an adenosine deaminase variant evolved from TadA. In some embodiments, the adenosine deaminase variant of ABE8 is a TadA*8 variant as described in Table 7 or 9 infra. In some embodiments, the adenosine deaminase variant is TadA*7.10 variant (e.g. TadA*8) comprising one or more of an alteration selected from the group of Y147T, Y147R, Q154S, Y123H, V82S, T166R, and/or Q154R. In various embodiments, ABE8 comprises TadA*7.10 variant (e.g. TadA*8) with a combination of alterations selected from the group of Y147T+Q154R; Y147T+Q154S; Y147R+Q154S; V82S+Q154S; V82S+Y147R; V82S+Q154R; V82S+Y123H; I76Y+V82S; V82S+Y123H+Y147T; V82S+Y123H+Y147R; V82S+Y123H+Q154R; Y147R+Q154R+Y123H; Y147R+Q154R+I76Y; Y147R+Q154R+T166R; Y123H+Y147R+Q154R+I76Y; V82S+Y123H+Y147R+Q154R; and I76Y+V82S+Y123H+Y147R+Q154R. In some embodiments ABE8 is a monomeric construct. In some embodiments, ABE8 is a heterodimeric construct. In some embodiments, the Adenosine Deaminase Base Editor 8 (ABE8) comprises the sequence:

MSEVEFSHEYWMRHALTLAKRARDEREVPVGAVLVLNNRVIGEGWNRAIGL
HDPTAHAEIMALRQGGLVMQNYRLIDATLYVTFEPCVMCAGAMIHSRIGRV
VFGVRNAKTGAAGSLMDVLHYPGMNHRVEITEGILADECAALLCTFFRMPR
QVFNAQKKAQSSTD.

[0070] In some embodiments, the polynucleotide programmable DNA binding domain is a CRISPR associated (e.g., Cas or Cpf1) enzyme. In some embodiments, the base editor is a catalytically dead Cas9 (dCas9) fused to a deaminase domain. In some embodiments, the base editor is a Cas9 nickase (nCas9) fused to a deaminase domain. Details of base editors are described in International PCT Application Nos. PCT/2017/045381 (WO 2018/027078) and PCT/US2016/058344 (WO 2017/070632), each of which is incorporated herein by reference for its entirety. Also see Komor, A. C., et al., “Programmable editing of a target base in genomic DNA without double-stranded DNA cleavage” Nature 533, 420-424 (2016); Gaudelli, N. M., et al., “Programmable base editing of A•T to G•C in genomic DNA without DNA cleavage” Nature 551, 464-471 (2017); Komor, A. C., et al., “Improved base excision repair inhibition and bacteriophage Mu Gam protein yields C:G-to-T:A base editors with higher efficiency and product purity” Science Advances 3:eaao4774 (2017), and Rees, H. A., et al., “Base editing: precision chemistry on the genome and transcriptome of living cells.” Nat Rev Genet. 2018 December; 19(12):770-788. doi: 10.1038/s41576-018-0059-1, the entire contents of which are hereby incorporated by reference.

[0071] By way of example, the adenine base editor (ABE) as used in the base editing compositions, systems and methods described herein has the nucleic acid sequence (8877 base pairs), (Addgene, Watertown, Mass.; Gaudelli N M, et al., Nature. 2017 Nov. 23; 551(7681):464-471. doi: 10.1038/nature24644; Koblan LW, et al., Nat Biotechnol. 2018 October; 36(9):843-846. doi: 10.1038/nbt.4172.) as provided below. Polynucleotide sequences having at least 95% or greater identity to the ABE nucleic acid sequence are also encompassed.

ATATGCCAAGTACGCCCCCTATTGACGTCAATGACGGTAAATGGCCCGCCTGGCATTATGCCCAGTACAT
GACCTTATGGGACTTTCCTACTTGGCAGTACATCTACGTATTAGTCATCGCTATTACCATGGTGATGCGG
TTTTGGCAGTACATCAATGGGCGTGGATAGCGGTTTGACTCACGGGGATTTCCAAGTCTCCACCCCATTG
ACGTCAATGGGAGTTTGTTTTGGCACCAAAATCAACGGGACTTTCCAAAATGTCGTAACAACTCCGCCCC
ATTGACGCAAATGGGCGGTAGGCGTGTACGGTGGGAGGTCTATATAAGCAGAGCTGGTTTAGTGAACCGT
CAGATCCGCTAGAGATCCGCGGCCGCTAATACGACTCACTATAGGGAGAGCCGCCACCATGAAACGGACA
GCCGACGGAAGCGAGTTCGAGTCACCAAAGAAGAAGCGGAAAGTCTCTGAAGTCGAGTTTAGCCACGAGT
ATTGGATGAGGCACGCACTGACCCTGGCAAAGCGAGCATGGGATGAAAGAGAAGTCCCCGTGGGCGCCGT
GCTGGTGCACAACAATAGAGTGATCGGAGAGGGATGGAACAGGCCAATCGGCCGCCACGACCCTACCGCA
CACGCAGAGATCATGGCACTGAGGCAGGGAGGCCTGGTCATGCAGAATTACCGCCTGATCGATGCCACCC
TGTATGTGACACTGGAGCCATGCGTGATGTGCGCAGGAGCAATGATCCACAGCAGGATCGGAAGAGTGGT
GTTCGGAGCACGGGACGCCAAGACCGGCGCAGCAGGCTCCCTGATGGATGTGCTGCACCACCCCGGCATG
AACCACCGGGTGGAGATCACAGAGGGAATCCTGGCAGACGAGTGCGCCGCCCTGCTGAGCGATTTCTTTA
GAATGCGGAGACAGGAGATCAAGGCCCAGAAGAAGGCACAGAGCTCCACCGACTCTGGAGGATCTAGCGG
AGGATCCTCTGGAAGCGAGACACCAGGCACAAGCGAGTCCGCCACACCAGAGAGCTCCGGCGGCTCCTCC
GGAGGATCCTCTGAGGTGGAGTTTTCCCACGAGTACTGGATGAGACATGCCCTGACCCTGGCCAAGAGGG
CACGCGATGAGAGGGAGGTGCCTGTGGGAGCCGTGCTGGTGCTGAACAATAGAGTGATCGGCGAGGGCTG
GAACAGAGCCATCGGCCTGCACGACCCAACAGCCCATGCCGAAATTATGGCCCTGAGACAGGGCGGCCTG
GTCATGCAGAACTACAGACTGATTGACGCCACCCTGTACGTGACATTCGAGCCTTGCGTGATGTGCGCCG
GCGCCATGATCCACTCTAGGATCGGCCGCGTGGTGTTTGGCGTGAGGAACGCAAAAACCGGCGCCGCAGG
CTCCCTGATGGACGTGCTGCACTACCCCGGCATGAATCACCGCGTCGAAATTACCGAGGGAATCCTGGCA
GATGAATGTGCCGCCCTGCTGTGCTATTTCTTTCGGATGCCTAGACAGGTGTTCAATGCTCAGAAGAAGG
CCCAGAGCTCCACCGACTCCGGAGGATCTAGCGGAGGCTCCTCTGGCTCTGAGACACCTGGCACAAGCGA
GAGCGCAACACCTGAAAGCAGCGGGGGCAGCAGCGGGGGGTCAGACAAGAAGTACAGCATCGGCCTGGCC
ATCGGCACCAACTCTGTGGGCTGGGCCGTGATCACCGACGAGTACAAGGTGCCCAGCAAGAAATTCAAGG
TGCTGGGCAACACCGACCGGCACAGCATCAAGAAGAACCTGATCGGAGCCCTGCTGTTCGACAGCGGCGA
AACAGCCGAGGCCACCCGGCTGAAGAGAACCGCCAGAAGAAGATACACCAGACGGAAGAACCGGATCTGC
TATCTGCAAGAGATCTTCAGCAACGAGATGGCCAAGGTGGACGACAGCTTCTTCCACAGACTGGAAGAGT
CCTTCCTGGTGGAAGAGGATAAGAAGCACGAGCGGCACCCCATCTTCGGCAACATCGTGGACGAGGTGGC
CTACCACGAGAAGTACCCCACCATCTACCACCTGAGAAAGAAACTGGTGGACAGCACCGACAAGGCCGAC
CTGCGGCTGATCTATCTGGCCCTGGCCCACATGATCAAGTTCCGGGGCCACTTCCTGATCGAGGGCGACC
TGAACCCCGACAACAGCGACGTGGACAAGCTGTTCATCCAGCTGGTGCAGACCTACAACCAGCTGTTCGA
GGAAAACCCCATCAACGCCAGCGGCGTGGACGCCAAGGCCATCCTGTCTGCCAGACTGAGCAAGAGCAGA
CGGCTGGAAAATCTGATCGCCCAGCTGCCCGGCGAGAAGAAGAATGGCCTGTTCGGAAACCTGATTGCCC
TGAGCCTGGGCCTGACCCCCAACTTCAAGAGCAACTTCGACCTGGCCGAGGATGCCAAACTGCAGCTGAG
CAAGGACACCTACGACGACGACCTGGACAACCTGCTGGCCCAGATCGGCGACCAGTACGCCGACCTGTTT
CTGGCCGCCAAGAACCTGTCCGACGCCATCCTGCTGAGCGACATCCTGAGAGTGAACACCGAGATCACCA
AGGCCCCCCTGAGCGCCTCTATGATCAAGAGATACGACGAGCACCACCAGGACCTGACCCTGCTGAAAGC
TCTCGTGCGGCAGCAGCTGCCTGAGAAGTACAAAGAGATTTTCTTCGACCAGAGCAAGAACGGCTACGCC
GGCTACATTGACGGCGGAGCCAGCCAGGAAGAGTTCTACAAGTTCATCAAGCCCATCCTGGAAAAGATGG
ACGGCACCGAGGAACTGCTCGTGAAGCTGAACAGAGAGGACCTGCTGCGGAAGCAGCGGACCTTCGACAA
CGGCAGCATCCCCCACCAGATCCACCTGGGAGAGCTGCACGCCATTCTGCGGCGGCAGGAAGATTTTTAC
CCATTCCTGAAGGACAACCGGGAAAAGATCGAGAAGATCCTGACCTTCCGCATCCCCTACTACGTGGGCC
CTCTGGCCAGGGGAAACAGCAGATTCGCCTGGATGACCAGAAAGAGCGAGGAAACCATCACCCCCTGGAA
CTTCGAGGAAGTGGTGGACAAGGGCGCTTCCGCCCAGAGCTTCATCGAGCGGATGACCAACTTCGATAAG
AACCTGCCCAACGAGAAGGTGCTGCCCAAGCACAGCCTGCTGTACGAGTACTTCACCGTGTATAACGAGC
TGACCAAAGTGAAATACGTGACCGAGGGAATGAGAAAGCCCGCCTTCCTGAGCGGCGAGCAGAAAAAGGC
CATCGTGGACCTGCTGTTCAAGACCAACCGGAAAGTGACCGTGAAGCAGCTGAAAGAGGACTACTTCAAG
AAAATCGAGTGCTTCGACTCCGTGGAAATCTCCGGCGTGGAAGATCGGTTCAACGCCTCCCTGGGCACAT
ACCACGATCTGCTGAAAATTATCAAGGACAAGGACTTCCTGGACAATGAGGAAAACGAGGACATTCTGGA
AGATATCGTGCTGACCCTGACACTGTTTGAGGACAGAGAGATGATCGAGGAACGGCTGAAAACCTATGCC
CACCTGTTCGACGACAAAGTGATGAAGCAGCTGAAGCGGCGGAGATACACCGGCTGGGGCAGGCTGAGCC
GGAAGCTGATCAACGGCATCCGGGACAAGCAGTCCGGCAAGACAATCCTGGATTTCCTGAAGTCCGACGG
CTTCGCCAACAGAAACTTCATGCAGCTGATCCACGACGACAGCCTGACCTTTAAAGAGGACATCCAGAAA
GCCCAGGTGTCCGGCCAGGGCGATAGCCTGCACGAGCACATTGCCAATCTGGCCGGCAGCCCCGCCATTA
AGAAGGGCATCCTGCAGACAGTGAAGGTGGTGGACGAGCTCGTGAAAGTGATGGGCCGGCACAAGCCCGA
GAACATCGTGATCGAAATGGCCAGAGAGAACCAGACCACCCAGAAGGGACAGAAGAACAGCCGCGAGAGA
ATGAAGCGGATCGAAGAGGGCATCAAAGAGCTGGGCAGCCAGATCCTGAAAGAACACCCCGTGGAAAACA
CCCAGCTGCAGAACGAGAAGCTGTACCTGTACTACCTGCAGAATGGGCGGGATATGTACGTGGACCAGGA
ACTGGACATCAACCGGCTGTCCGACTACGATGTGGACCATATCGTGCCTCAGAGCTTTCTGAAGGACGAC
TCCATCGACAACAAGGTGCTGACCAGAAGCGACAAGAACCGGGGCAAGAGCGACAACGTGCCCTCCGAAG
AGGTCGTGAAGAAGATGAAGAACTACTGGCGGCAGCTGCTGAACGCCAAGCTGATTACCCAGAGAAAGTT
CGACAATCTGACCAAGGCCGAGAGAGGCGGCCTGAGCGAACTGGATAAGGCCGGCTTCATCAAGAGACAG
CTGGTGGAAACCCGGCAGATCACAAAGCACGTGGCACAGATCCTGGACTCCCGGATGAACACTAAGTACG
ACGAGAATGACAAGCTGATCCGGGAAGTGAAAGTGATCACCCTGAAGTCCAAGCTGGTGTCCGATTTCCG
GAAGGATTTCCAGTTTTACAAAGTGCGCGAGATCAACAACTACCACCACGCCCACGACGCCTACCTGAAC
GCCGTCGTGGGAACCGCCCTGATCAAAAAGTACCCTAAGCTGGAAAGCGAGTTCGTGTACGGCGACTACA
AGGTGTACGACGTGCGGAAGATGATCGCCAAGAGCGAGCAGGAAATCGGCAAGGCTACCGCCAAGTACTT
CTTCTACAGCAACATCATGAACTTTTTCAAGACCGAGATTACCCTGGCCAACGGCGAGATCCGGAAGCGG
CCTCTGATCGAGACAAACGGCGAAACCGGGGAGATCGTGTGGGATAAGGGCCGGGATTTTGCCACCGTGC
GGAAAGTGCTGAGCATGCCCCAAGTGAATATCGTGAAAAAGACCGAGGTGCAGACAGGCGGCTTCAGCAA
AGAGTCTATCCTGCCCAAGAGGAACAGCGATAAGCTGATCGCCAGAAAGAAGGACTGGGACCCTAAGAAG
TACGGCGGCTTCGACAGCCCCACCGTGGCCTATTCTGTGCTGGTGGTGGCCAAAGTGGAAAAGGGCAAGT
CCAAGAAACTGAAGAGTGTGAAAGAGCTGCTGGGGATCACCATCATGGAAAGAAGCAGCTTCGAGAAGAA
TCCCATCGACTTTCTGGAAGCCAAGGGCTACAAAGAAGTGAAAAAGGACCTGATCATCAAGCTGCCTAAG
TACTCCCTGTTCGAGCTGGAAAACGGCCGGAAGAGAATGCTGGCCTCTGCCGGCGAACTGCAGAAGGGAA
ACGAACTGGCCCTGCCCTCCAAATATGTGAACTTCCTGTACCTGGCCAGCCACTATGAGAAGCTGAAGGG
CTCCCCCGAGGATAATGAGCAGAAACAGCTGTTTGTGGAACAGCACAAGCACTACCTGGACGAGATCATC
GAGCAGATCAGCGAGTTCTCCAAGAGAGTGATCCTGGCCGACGCTAATCTGGACAAAGTGCTGTCCGCCT
ACAACAAGCACCGGGATAAGCCCATCAGAGAGCAGGCCGAGAATATCATCCACCTGTTTACCCTGACCAA
TCTGGGAGCCCCTGCCGCCTTCAAGTACTTTGACACCACCATCGACCGGAAGAGGTACACCAGCACCAAA
GAGGTGCTGGACGCCACCCTGATCCACCAGAGCATCACCGGCCTGTACGAGACACGGATCGACCTGTCTC
AGCTGGGAGGTGACTCTGGCGGCTCAAAAAGAACCGCCGACGGCAGCGAATTCGAGCCCAAGAAGAAGAG
GAAAGTCTAACCGGTCATCATCACCATCACCATTGAGTTTAAACCCGCTGATCAGCCTCGACTGTGCCTT
CTAGTTGCCAGCCATCTGTTGTTTGCCCCTCCCCCGTGCCTTCCTTGACCCTGGAAGGTGCCACTCCCAC
TGTCCTTTCCTAATAAAATGAGGAAATTGCATCGCATTGTCTGAGTAGGTGTCATTCTATTCTGGGGGGT
GGGGTGGGGCAGGACAGCAAGGGGGAGGATTGGGAAGACAATAGCAGGCATGCTGGGGATGCGGTGGGCT
CTATGGCTTCTGAGGCGGAAAGAACCAGCTGGGGCTCGATACCGTCGACCTCTAGCTAGAGCTTGGCGTA
ATCATGGTCATAGCTGTTTCCTGTGTGAAATTGTTATCCGCTCACAATTCCACACAACATACGAGCCGGA
AGCATAAAGTGTAAAGCCTAGGGTGCCTAATGAGTGAGCTAACTCACATTAATTGCGTTGCGCTCACTGC
CCGCTTTCCAGTCGGGAAACCTGTCGTGCCAGCTGCATTAATGAATCGGCCAACGCGCGGGGAGAGGCGG
TTTGCGTATTGGGCGCTCTTCCGCTTCCTCGCTCACTGACTCGCTGCGCTCGGTCGTTCGGCTGCGGCGA
GCGGTATCAGCTCACTCAAAGGCGGTAATACGGTTATCCACAGAATCAGGGGATAACGCAGGAAAGAACA
TGTGAGCAAAAGGCCAGCAAAAGGCCAGGAACCGTAAAAAGGCCGCGTTGCTGGCGTTTTTCCATAGGCT
CCGCCCCCCTGACGAGCATCACAAAAATCGACGCTCAAGTCAGAGGTGGCGAAACCCGACAGGACTATAA
AGATACCAGGCGTTTCCCCCTGGAAGCTCCCTCGTGCGCTCTCCTGTTCCGACCCTGCCGCTTACCGGAT
ACCTGTCCGCCTTTCTCCCTTCGGGAAGCGTGGCGCTTTCTCATAGCTCACGCTGTAGGTATCTCAGTTC
GGTGTAGGTCGTTCGCTCCAAGCTGGGCTGTGTGCACGAACCCCCCGTTCAGCCCGACCGCTGCGCCTTA
TCCGGTAACTATCGTCTTGAGTCCAACCCGGTAAGACACGACTTATCGCCACTGGCAGCAGCCACTGGTA
ACAGGATTAGCAGAGCGAGGTATGTAGGCGGTGCTACAGAGTTCTTGAAGTGGTGGCCTAACTACGGCTA
CACTAGAAGAACAGTATTTGGTATCTGCGCTCTGCTGAAGCCAGTTACCTTCGGAAAAAGAGTTGGTAGC
TCTTGATCCGGCAAACAAACCACCGCTGGTAGCGGTGGTTTTTTTGTTTGCAAGCAGCAGATTACGCGCA
GAAAAAAAGGATCTCAAGAAGATCCTTTGATCTTTTCTACGGGGTCTGACACTCAGTGGAACGAAAACTC
ACGTTAAGGGATTTTGGTCATGAGATTATCAAAAAGGATCTTCACCTAGATCCTTTTAAATTAAAAATGA
AGTTTTAAATCAATCTAAAGTATATATGAGTAAACTTGGTCTGACAGTTACCAATGCTTAATCAGTGAGG
CACCTATCTCAGCGATCTGTCTATTTCGTTCATCCATAGTTGCCTGACTCCCCGTCGTGTAGATAACTAC
GATACGGGAGGGCTTACCATCTGGCCCCAGTGCTGCAATGATACCGCGAGACCCACGCTCACCGGCTCCA
GATTTATCAGCAATAAACCAGCCAGCCGGAAGGGCCGAGCGCAGAAGTGGTCCTGCAACTTTATCCGCCT
CCATCCAGTCTATTAATTGTTGCCGGGAAGCTAGAGTAAGTAGTTCGCCAGTTAATAGTTTGCGCAACGT
TGTTGCCATTGCTACAGGCATCGTGGTGTCACGCTCGTCGTTTGGTATGGCTTCATTCAGCTCCGGTTCC
CAACGATCAAGGCGAGTTACATGATCCCCCATGTTGTGCAAAAAAGCGGTTAGCTCCTTCGGTCCTCCGA
TCGTTGTCAGAAGTAAGTTGGCCGCAGTGTTATCACTCATGGTTATGGCAGCACTGCATAATTCTCTTAC
TGTCATGCCATCCGTAAGATGCTTTTCTGTGACTGGTGAGTACTCAACCAAGTCATTCTGAGAATAGTGT
ATGCGGCGACCGAGTTGCTCTTGCCCGGCGTCAATACGGGATAATACCGCGCCACATAGCAGAACTTTAA
AAGTGCTCATCATTGGAAAACGTTCTTCGGGGCGAAAACTCTCAAGGATCTTACCGCTGTTGAGATCCAG
TTCGATGTAACCCACTCGTGCACCCAACTGATCTTCAGCATCTTTTACTTTCACCAGCGTTTCTGGGTGA
GCAAAAACAGGAAGGCAAAATGCCGCAAAAAAGGGAATAAGGGCGACACGGAAATGTTGAATACTCATAC
TCTTCCTTTTTCAATATTATTGAAGCATTTATCAGGGTTATTGTCTCATGAGCGGATACATATTTGAATG
TATTTAGAAAAATAAACAAATAGGGGTTCCGCGCACATTTCCCCGAAAAGTGCCACCTGACGTCGACGGA
TCGGGAGATCGATCTCCCGATCCCCTAGGGTCGACTCTCAGTACAATCTGCTCTGATGCCGCATAGTTAA
GCCAGTATCTGCTCCCTGCTTGTGTGTTGGAGGTCGCTGAGTAGTGCGCGAGCAAAATTTAAGCTACAAC
AAGGCAAGGCTTGACCGACAATTGCATGAAGAATCTGCTTAGGGTTAGGCGTTTTGCGCTGCTTCGCGAT
GTACGGGCCAGATATACGCGTTGACATTGATTATTGACTAGTTATTAATAGTAATCAATTACGGGGTCAT
TAGTTCATAGCCCATATATGGAGTTCCGCGTTACATAACTTACGGTAAATGGCCCGCCTGGCTGACCGCC
CAACGACCCCCGCCCATTGACGTCAATAATGACGTATGTTCCCATAGTAACGCCAATAGGGACTTTCCAT
TGACGTCAATGGGTGGAGTATTTACGGTAAACTGCCCACTTGGCAGTACATCAAGTGTATC

[0072] By “base editing activity” is meant acting to chemically alter a base within a polynucleotide. In one embodiment, a first base is converted to a second base. In one embodiment, the base editing activity is cytidine deaminase activity, e.g., converting target C•G to T•A. In another embodiment, the base editing activity is adenosine or adenine deaminase activity, e.g., converting A•T to G•C. In another embodiment, the base editing activity is cytidine deaminase activity, e.g., converting target C•G to T•A and adenosine or adenine deaminase activity, e.g., converting A•T to G•C. In some embodiments, base editing activity is assessed by efficiency of editing. Base editing efficiency may be measured by any suitable means, for example, by sanger sequencing or next generation sequencing. In some embodiments, base editing efficiency is measured by percentage of total sequencing reads with nucleobase conversion effected by the base editor, for example, percentage of total sequencing reads with target A.T base pair converted to a G.C base pair. In some embodiments, base editing efficiency is measured by percentage of total cells with nucleobase conversion effected by the abse editor, when base editing is performed in a population of cells.

[0073] The term “base editor system” refers to a system for editing a nucleobase of a target nucleotide sequence. In various embodiments, the base editor system comprises (1) a polynucleotide programmable nucleotide binding domain (e.g. Cas9); (2) a deaminase domain (e.g. an adenosine deaminase) for deaminating said nucleobase; and (3) one or more guide polynucleotide (e.g., guide RNA). In some embodiments, the polynucleotide programmable nucleotide binding domain is a polynucleotide programmable DNA binding domain. In some embodiments, the base editor is an adenine or adenosine base editor (ABE). In some embodiments, the base editor system is ABE8.

[0074] In some embodiments, a base editor system may comprise more than one base editing component. For example, a base editor system may include more than one deaminase. In some embodiments, a base editor system may include one or more adenosine deaminases. In some embodiments, a single guide polynucleotide may be utilized to target different deaminases to a target nucleic acid sequence. In some embodiments, a single pair of guide polynucleotides may be utilized to target different deaminases to a target nucleic acid sequence.

[0075] The deaminase domain and the polynucleotide programmable nucleotide binding component of a base editor system may be associated with each other covalently or non-covalently, or any combination of associations and interactions thereof. For example, in some embodiments, a deaminase domain can be targeted to a target nucleotide sequence by a polynucleotide programmable nucleotide binding domain. In some embodiments, a polynucleotide programmable nucleotide binding domain can be fused or linked to a deaminase domain. In some embodiments, a polynucleotide programmable nucleotide binding domain can target a deaminase domain to a target nucleotide sequence by non-covalently interacting with or associating with the deaminase domain. For example, in some embodiments, the deaminase domain can comprise an additional heterologous portion or domain that is capable of interacting with, associating with, or capable of forming a complex with an additional heterologous portion or domain that is part of a polynucleotide programmable nucleotide binding domain. In some embodiments, the additional heterologous portion may be capable of binding to, interacting with, associating with, or forming a complex with a polypeptide. In some embodiments, the additional heterologous portion may be capable of binding to, interacting with, associating with, or forming a complex with a polynucleotide. In some embodiments, the additional heterologous portion may be capable of binding to a guide polynucleotide. In some embodiments, the additional heterologous portion may be capable of binding to a polypeptide linker. In some embodiments, the additional heterologous portion may be capable of binding to a polynucleotide linker. The additional heterologous portion may be a protein domain. In some embodiments, the additional heterologous portion may be a K Homology (KH) domain, a MS2 coat protein domain, a PP7 coat protein domain, a SfMu Com coat protein domain, a steril alpha motif, a telomerase Ku binding motif and Ku protein, a telomerase Sm7 binding motif and Sm7 protein, or a RNA recognition motif.

[0076] A base editor system may further comprise a guide polynucleotide component. It should be appreciated that components of the base editor system may be associated with each other via covalent bonds, noncovalent interactions, or any combination of associations and interactions thereof. In some embodiments, a deaminase domain can be targeted to a target nucleotide sequence by a guide polynucleotide. For example, in some embodiments, the deaminase domain can comprise an additional heterologous portion or domain (e.g., polynucleotide binding domain such as an RNA or DNA binding protein) that is capable of interacting with, associating with, or capable of forming a complex with a portion or segment (e.g., a polynucleotide motif) of a guide polynucleotide. In some embodiments, the additional heterologous portion or domain (e.g., polynucleotide binding domain such as an RNA or DNA binding protein) can be fused or linked to the deaminase domain. In some embodiments, the additional heterologous portion may be capable of binding to, interacting with, associating with, or forming a complex with a polypeptide. In some embodiments, the additional heterologous portion may be capable of binding to, interacting with, associating with, or forming a complex with a polynucleotide. In some embodiments, the additional heterologous portion may be capable of binding to a guide polynucleotide. In some embodiments, the additional heterologous portion may be capable of binding to a polypeptide linker. In some embodiments, the additional heterologous portion may be capable of binding to a polynucleotide linker. The additional heterologous portion may be a protein domain. In some embodiments, the additional heterologous portion may be a K Homology (KH) domain, a MS2 coat protein domain, a PP7 coat protein domain, a SfMu Com coat protein domain, a sterile alpha motif, a telomerase Ku binding motif and Ku protein, a telomerase Sm7 binding motif and Sm7 protein, or a RNA recognition motif.

[0077] In some embodiments, a base editor system can further comprise an inhibitor of base excision repair (BER) component. It should be appreciated that components of the base editor system may be associated with each other via covalent bonds, noncovalent interactions, or any combination of associations and interactions thereof. The inhibitor of BER component may comprise a BER inhibitor. In some embodiments, the inhibitor of BER can be a uracil DNA glycosylase inhibitor (UGI). In some embodiments, the inhibitor of BER can be an inosine BER inhibitor. In some embodiments, the inhibitor of BER can be targeted to the target nucleotide sequence by the polynucleotide programmable nucleotide binding domain. In some embodiments, a polynucleotide programmable nucleotide binding domain can be fused or linked to an inhibitor of BER. In some embodiments, a polynucleotide programmable nucleotide binding domain can be fused or linked to a deaminase domain and an inhibitor of BER. In some embodiments, a polynucleotide programmable nucleotide binding domain can target an inhibitor of BER to a target nucleotide sequence by non-covalently interacting with or associating with the inhibitor of BER. For example, in some embodiments, the inhibitor of BER component can comprise an additional heterologous portion or domain that is capable of interacting with, associating with, or capable of forming a complex with an additional heterologous portion or domain that is part of a polynucleotide programmable nucleotide binding domain.

[0078] In some embodiments, the inhibitor of BER can be targeted to the target nucleotide sequence by the guide polynucleotide. For example, in some embodiments, the inhibitor of BER can comprise an additional heterologous portion or domain (e.g., polynucleotide binding domain such as an RNA or DNA binding protein) that is capable of interacting with, associating with, or capable of forming a complex with a portion or segment (e.g., a polynucleotide motif) of a guide polynucleotide. In some embodiments, the additional heterologous portion or domain of the guide polynucleotide (e.g., polynucleotide binding domain such as an RNA or DNA binding protein) can be fused or linked to the inhibitor of BER. In some embodiments, the additional heterologous portion may be capable of binding to, interacting with, associating with, or forming a complex with a polynucleotide. In some embodiments, the additional heterologous portion may be capable of binding to a guide polynucleotide. In some embodiments, the additional heterologous portion may be capable of binding to a polypeptide linker. In some embodiments, the additional heterologous portion may be capable of binding to a polynucleotide linker. The additional heterologous portion may be a protein domain. In some embodiments, the additional heterologous portion may be a K Homology (KH) domain, a MS2 coat protein domain, a PP7 coat protein domain, a SfMu Com coat protein domain, a sterile alpha motif, a telomerase Ku binding motif and Ku protein, a telomerase Sm7 binding motif and Sm7 protein, or an RNA recognition motif.

[0079] The term “Cas9” or “Cas9 domain” refers to an RNA guided nuclease comprising a Cas9 protein, or a fragment thereof (e.g., a protein comprising an active, inactive, or partially active DNA cleavage domain of Cas9, and/or the gRNA binding domain of Cas9). A Cas9 nuclease is also referred to sometimes as a Casn1 nuclease or a CRISPR (clustered regularly interspaced short palindromic repeat) associated nuclease. CRISPR is an adaptive immune system that provides protection against mobile genetic elements (viruses, transposable elements and conjugative plasmids). CRISPR clusters contain spacers, sequences complementary to antecedent mobile elements, and target invading nucleic acids. CRISPR clusters are transcribed and processed into CRISPR RNA (crRNA). In type II CRISPR systems correct processing of pre-crRNA requires a trans-encoded small RNA (tracrRNA), endogenous ribonuclease 3 (rnc) and a Cas9 protein. The tracrRNA serves as a guide for ribonuclease 3-aided processing of pre-crRNA. Subsequently, Cas9/crRNA/tracrRNA endonucleolytically cleaves linear or circular dsDNA target complementary to the spacer.

[0080] The target strand not complementary to crRNA is first cut endonucleolytically, then trimmed 3′-5′ exonucleolytically. In nature, DNA-binding and cleavage typically requires protein and both RNAs. However, single guide RNAs (“sgRNA”, or simply “gRNA”) can be engineered so as to incorporate aspects of both the crRNA and tracrRNA into a single RNA species. See, e.g., Jinek M., Chylinski K., Fonfara I., Hauer M., Doudna J. A., Charpentier E. Science 337:816-821(2012), the entire contents of which is hereby incorporated by reference. Cas9 recognizes a short motif in the CRISPR repeat sequences (the PAM or protospacer adjacent motif) to help distinguish self versus non-self. Cas9 nuclease sequences and structures are well known to those of skill in the art (see, e.g., “Complete genome sequence of an M1 strain of Streptococcus pyogenes.” Ferretti et al., J. J., McShan W. M., Ajdic D. J., Savic D. J., Savic G., Lyon K., Primeaux C., Sezate S., Suvorov A. N., Kenton S., Lai H. S., Lin S. P., Qian Y., Jia H. G., Najar F. Z., Ren Q., Zhu H., Song L., White J., Yuan X., Clifton S. W., Roe B. A., McLaughlin R. E., Proc. Natl. Acad. Sci. U.S.A. 98:4658-4663(2001); “CRISPR RNA maturation by trans-encoded small RNA and host factor RNase III.” Deltcheva E., Chylinski K., Sharma C. M., Gonzales K., Chao Y., Pirzada Z. A., Eckert M. R., Vogel J., Charpentier E., Nature 471:602-607(2011); and “A programmable dual-RNA-guided DNA endonuclease in adaptive bacterial immunity.” Jinek M., Chylinski K., Fonfara I., Hauer M., Doudna J. A., Charpentier E. Science 337:816-821(2012), the entire contents of each of which are incorporated herein by reference). Cas9 orthologs have been described in various species, including, but not limited to, S. pyogenes and S. thermophilus. Additional suitable Cas9 nucleases and sequences will be apparent to those of skill in the art based on this disclosure, and such Cas9 nucleases and sequences include Cas9 sequences from the organisms and loci disclosed in Chylinski, Rhun, and Charpentier, “The tracrRNA and Cas9 families of type II CRISPR-Cas immunity systems” (2013) RNA Biology 10:5, 726-737; the entire contents of which are incorporated herein by reference.

[0081] An exemplary Cas9, is Streptococcus pyogenes Cas9 (spCas9), the amino acid sequence of which is provided below:

MDKKYSIGLDIGTNSVGWAVITDDYKVPSKKFKVLGNTDRHSIKKNLIGAL
LFGSGETAEATRLKRTARRRYTRRKNRICYLQEIFSNEMAKVDDSFFHRLE
ESFLVEEDKKHERHPIFGNIVDEVAYHEKYPTIYHLRKKLADSTDKADLRL
IYLALAHMIKFRGHFLIEGDLNPDNSDVDKLFIQLVQIYNQLFEENPINAS
RVDAKAILSARLSKSRRLENLIAQLPGEKRNGLFGNLIALSLGLTPNFKSN
FDLAEDAKLQLSKDTYDDDLDNLLAQIGDQYADLFLAAKNLSDAILLSDIL
RVNSEITKAPLSASMIKRYDEHHQDLTLLKALVRQQLPEKYKEIFFDQSKN
GYAGYIDGGASQEEFYKFIKPILEKMDGTEELLVKLNREDLLRKQRTFDNG
SIPHQIHLGELHAILRRQEDFYPFLKDNREKIEKILTFRIPYYVGPLARGN
SRFAWMTRKSEETITPWNFEEVVDKGASAQSFIERMTNFDKNLPNEKVLPK
HSLLYEYFTVYNELTKVKYVTEGMRKPAFLSGEQKKAIVDLLFKTNRKVTV
KQLKEDYFKKIECFDSVEISGVEDRFNASLGAYHDLLKIIKDKDFLDNEEN
EDILEDIVLTLTLFEDRGMIEERLKTYAHLFDDKVMKQLKRRRYTGWGRLS
RKLINGIRDKQSGKTILDFLKSDGFANRNFMQLIHDDSLTFKEDIQKAQVS
GQGHSLHEQIANLAGSPAIKKGILQTVKIVDELVKVMGHKPENIVIEMARE
NQTTQKGQKNSRERMKRIEEGIKELGSQILKEHPVENTQLQNEKLYLYYLQ
NGRDMYVDQELDINRLSDYDVDHIVPQSFIKDDSIDNKVLTRSDKNRGKSD
NVPSEEVVKKMKNYWRQLLNAKLITQRKFDNLTKAERGGLSELDKAGFIKR
QLVETRQITKHVAQILDSRMNTKYDENDKLIREVKVITLKSKLVSDFRKDF
QFYKVREINNYHHAHDAYLNAVVGTALIKKYPKLESEFVYGDYKVYDVRKM
IAKSEQEIGKATAKYFFYSNIMNFFKTEITLANGEIRKRPLIETNGETGEI
VWDKGRDFATVRKVLSMPQVNIVKKTEVQTGGFSKESILPKRNSDKLIARK
KDWDPKKYGGFDSPTVAYSVLVVAKVEKGKSKKLKSVKELLGITIMERSSF
EKNPIDFLEAKGYKEVKKDLIIKLPKYSLFELENGRKRMLASAGELQKGNE
LALPSKYVNFLYLASHYEKLKGSPEDNEQKQLFVEQHKHYLDEIIEQISEF
SKRVILADANLDKVLSAYNKHRDKPIREQAENIIHLFTLTNLGAPAAFKYF
DTTIDRKRYTSTKEVLDATLIHQSITGLYETRIDLSQLGGD
(single underline: HNH domain; double underline:
RuvC domain)

[0082] A nuclease-inactivated Cas9 protein may interchangeably be referred to as a “dCas9” protein (for nuclease-“dead” Cas9) or catalytically inactive Cas9. Methods for generating a Cas9 protein (or a fragment thereof) having an inactive DNA cleavage domain are known (See, e.g., Jinek et al., Science. 337:816-821(2012); Qi et al., “Repurposing CRISPR as an RNA-Guided Platform for Sequence-Specific Control of Gene Expression” (2013) Cell. 28; 152(5):1173-83, the entire contents of each of which are incorporated herein by reference). For example, the DNA cleavage domain of Cas9 is known to include two subdomains, the HNH nuclease subdomain and the RuvC1 subdomain. The HNH subdomain cleaves the strand complementary to the gRNA, whereas the RuvC1 subdomain cleaves the non-complementary strand. Mutations within these subdomains can silence the nuclease activity of Cas9. For example, the mutations D10A and H840A completely inactivate the nuclease activity of S. pyogenes Cas9 (Jinek et al., Science. 337:816-821(2012); Qi et al., Cell. 28; 152(5):1173-83 (2013)). In some embodiments, a Cas9 nuclease has an inactive (e.g., an inactivated) DNA cleavage domain, that is, the Cas9 is a nickase, referred to as an “nCas9” protein (for “nickase” Cas9). In some embodiments, proteins comprising fragments of Cas9 are provided. For example, in some embodiments, a protein comprises one of two Cas9 domains: (1) the gRNA binding domain of Cas9; or (2) the DNA cleavage domain of Cas9. In some embodiments, proteins comprising Cas9 or fragments thereof are referred to as “Cas9 variants.” A Cas9 variant shares homology to Cas9, or a fragment thereof. For example, a Cas9 variant is at least about 70% identical, at least about 80% identical, at least about 90% identical, at least about 95% identical, at least about 96% identical, at least about 97% identical, at least about 98% identical, at least about 99% identical, at least about 99.5% identical, or at least about 99.9% identical to wild-type Cas9. In some embodiments, the Cas9 variant may have 1, 2, 3, 4, 5, 6, 7, 8, 9, 10, 11, 12, 13, 14, 15, 16, 17, 18, 19, 20, 21, 22, 21, 24, 25, 26, 27, 28, 29, 30, 31, 32, 33, 34, 35, 36, 37, 38, 39, 40, 41, 42, 43, 44, 45, 46, 47, 48, 49, 50 or more amino acid changes compared to wild-type Cas9. In some embodiments, the Cas9 variant comprises a fragment of Cas9 (e.g., a gRNA binding domain or a DNA-cleavage domain), such that the fragment is at least about 70% identical, at least about 80% identical, at least about 90% identical, at least about 95% identical, at least about 96% identical, at least about 97% identical, at least about 98% identical, at least about 99% identical, at least about 99.5% identical, or at least about 99.9% identical to the corresponding fragment of wild-type Cas9. In some embodiments, the fragment is at least 30%, at least 35%, at least 40%, at least 45%, at least 50%, at least 55%, at least 60%, at least 65%, at least 70%, at least 75%, at least 80%, at least 85%, at least 90%, at least 95% identical, at least 96%, at least 97%, at least 98%, at least 99%, or at least 99.5% of the amino acid length of a corresponding wild-type Cas9.

[0083] In some embodiments, the fragment is at least 100 amino acids in length. In some embodiments, the fragment is at least 100, 150, 200, 250, 300, 350, 400, 450, 500, 550, 600, 650, 700, 750, 800, 850, 900, 950, 1000, 1050, 1100, 1150, 1200, 1250, or at least 1300 amino acids in length.

[0084] In some embodiments, wild-type Cas9 corresponds to Cas9 from Streptococcus pyogenes (NCBI Reference Sequence: NC_017053.1, nucleotide and amino acid sequences as follows).

ATGGATAAGAAATACTCAATAGGCTTAGATATCGGCACAAATAGCGTCGGATGGGCGGTGAT
CACTGATGATTATAAGGTTCCGTCTAAAAAGTTCAAGGTTCTGGGAAATACAGACCGCCACA
GTATCAAAAAAAATCTTATAGGGGCTCTTTTATTTGGCAGTGGAGAGACAGCGGAAGCGACT
CGTCTCAAACGGACAGCTCGTAGAAGGTATACACGTCGGAAGAATCGTATTTGTTATCTACA
GGAGATTTTTTCAAATGAGATGGCGAAAGTAGATGATAGTTTCTTTCATCGACTTGAAGAGT
CTTTTTTGGTGGAAGAAGACAAGAAGCATGAACGTCATCCTATTTTTGGAAATATAGTAGAT
GAAGTTGCTTATCATGAGAAATATCCAACTATCTATCATCTGCGAAAAAAATTGGCAGATTC
TACTGATAAAGCGGATTTGCGCTTAATCTATTTGGCCTTAGCGCATATGATTAAGTTTCGTG
GTCATTTTTTGATTGAGGGAGATTTAAATCCTGATAATAGTGATGTGGACAAACTATTTATC
CAGTTGGTACAAATCTACAATCAATTATTTGAAGAAAACCCTATTAACGCAAGTAGAGTAGA
TGCTAAAGCGATTCTTTCTGCACGATTGAGTAAATCAAGACGATTAGAAAATCTCATTGCTC
AGCTCCCCGGTGAGAAGAGAAATGGCTTGTTTGGGAATCTCATTGCTTTGTCATTGGGATTG
ACCCCTAATTTTAAATCAAATTTTGATTTGGCAGAAGATGCTAAATTACAGCTTTCAAAAGA
TACTTACGATGATGATTTAGATAATTTATTGGCGCAAATTGGAGATCAATATGCTGATTTGT
TTTTGGCAGCTAAGAATTTATCAGATGCTATTTTACTTTCAGATATCCTAAGAGTAAATAGT
GAAATAACTAAGGCTCCCCTATCAGCTTCAATGATTAAGCGCTACGATGAACATCATCAAGA
CTTGACTCTTTTAAAAGCTTTAGTTCGACAACAACTTCCAGAAAAGTATAAAGAAATCTTTT
TTGATCAATCAAAAAACGGATATGCAGGTTATATTGATGGGGGAGCTAGCCAAGAAGAATTT
TATAAATTTATCAAACCAATTTTAGAAAAAATGGATGGTACTGAGGAATTATTGGTGAAACT
AAATCGTGAAGATTTGCTGCGCAAGCAACGGACCTTTGACAACGGCTCTATTCCCCATCAAA
TTCACTTGGGTGAGCTGCATGCTATTTTGAGAAGACAAGAAGACTTTTATCCATTTTTAAAA
GACAATCGTGAGAAGATTGAAAAAATCTTGACTTTTCGAATTCCTTATTATGTTGGTCCATT
GGCGCGTGGCAATAGTCGTTTTGCATGGATGACTCGGAAGTCTGAAGAAACAATTACCCCAT
GGAATTTTGAAGAAGTTGTCGATAAAGGTGCTTCAGCTCAATCATTTATTGAACGCATGACA
AACTTTGATAAAAATCTTCCAAATGAAAAAGTACTACCAAAACATAGTTTGCTTTATGAGTA
TTTTACGGTTTATAACGAATTGACAAAGGTCAAATATGTTACTGAGGGAATGCGAAAACCAG
CATTTCTTTCAGGTGAACAGAAGAAAGCCATTGTTGATTTACTCTTCAAAACAAATCGAAAA
GTAACCGTTAAGCAATTAAAAGAAGATTATTTCAAAAAAATAGAATGTTTTGATAGTGTTGA
AATTTCAGGAGTTGAAGATAGATTTAATGCTTCATTAGGCGCCTACCATGATTTGCTAAAAA
TTATTAAAGATAAAGATTTTTTGGATAATGAAGAAAATGAAGATATCTTAGAGGATATTGTT
TTAACATTGACCTTATTTGAAGATAGGGGGATGATTGAGGAAAGACTTAAAACATATGCTCA
CCTCTTTGATGATAAGGTGATGAAACAGCTTAAACGTCGCCGTTATACTGGTTGGGGACGTT
TGTCTCGAAAATTGATTAATGGTATTAGGGATAAGCAATCTGGCAAAACAATATTAGATTTT
TTGAAATCAGATGGTTTTGCCAATCGCAATTTTATGCAGCTGATCCATGATGATAGTTTGAC
ATTTAAAGAAGATATTCAAAAAGCACAGGTGTCTGGACAAGGCCATAGTTTACATGAACAGA
TTGCTAACTTAGCTGGCAGTCCTGCTATTAAAAAAGGTATTTTACAGACTGTAAAAATTGTT
GATGAACTGGTCAAAGTAATGGGGCATAAGCCAGAAAATATCGTTATTGAAATGGCACGTGA
AAATCAGACAACTCAAAAGGGCCAGAAAAATTCGCGAGAGCGTATGAAACGAATCGAAGAAG
GTATCAAAGAATTAGGAAGTCAGATTCTTAAAGAGCATCCTGTTGAAAATACTCAATTGCAA
AATGAAAAGCTCTATCTCTATTATCTACAAAATGGAAGAGACATGTATGTGGACCAAGAATT
AGATATTAATCGTTTAAGTGATTATGATGTCGATCACATTGTTCCACAAAGTTTCATTAAAG
ACGATTCAATAGACAATAAGGTACTAACGCGTTCTGATAAAAATCGTGGTAAATCGGATAAC
GTTCCAAGTGAAGAAGTAGTCAAAAAGATGAAAAACTATTGGAGACAACTTCTAAACGCCAA
GTTAATCACTCAACGTAAGTTTGATAATTTAACGAAAGCTGAACGTGGAGGTTTGAGTGAAC
TTGATAAAGCTGGTTTTATCAAACGCCAATTGGTTGAAACTCGCCAAATCACTAAGCATGTG
GCACAAATTTTGGATAGTCGCATGAATACTAAATACGATGAAAATGATAAACTTATTCGAGA
GGTTAAAGTGATTACCTTAAAATCTAAATTAGTTTCTGACTTCCGAAAAGATTTCCAATTCT
ATAAAGTACGTGAGATTAACAATTACCATCATGCCCATGATGCGTATCTAAATGCCGTCGTT
GGAACTGCTTTGATTAAGAAATATCCAAAACTTGAATCGGAGTTTGTCTATGGTGATTATAA
AGTTTATGATGTTCGTAAAATGATTGCTAAGTCTGAGCAAGAAATAGGCAAAGCAACCGCAA
AATATTTCTTTTACTCTAATATCATGAACTTCTTCAAAACAGAAATTACACTTGCAAATGGA
GAGATTCGCAAACGCCCTCTAATCGAAACTAATGGGGAAACTGGAGAAATTGTCTGGGATAA
AGGGCGAGATTTTGCCACAGTGCGCAAAGTATTGTCCATGCCCCAAGTCAATATTGTCAAGA
AAACAGAAGTACAGACAGGCGGATTCTCCAAGGAGTCAATTTTACCAAAAAGAAATTCGGAC
AAGCTTATTGCTCGTAAAAAAGACTGGGATCCAAAAAAATATGGTGGTTTTGATAGTCCAAC
GGTAGCTTATTCAGTCCTAGTGGTTGCTAAGGTGGAAAAAGGGAAATCGAAGAAGTTAAAAT
CCGTTAAAGAGTTACTAGGGATCACAATTATGGAAAGAAGTTCCTTTGAAAAAAATCCGATT
GACTTTTTAGAAGCTAAAGGATATAAGGAAGTTAAAAAAGACTTAATCATTAAACTACCTAA
ATATAGTCTTTTTGAGTTAGAAAACGGTCGTAAACGGATGCTGGCTAGTGCCGGAGAATTAC
AAAAAGGAAATGAGCTGGCTCTGCCAAGCAAATATGTGAATTTTTTATATTTAGCTAGTCAT
TATGAAAAGTTGAAGGGTAGTCCAGAAGATAACGAACAAAAACAATTGTTTGTGGAGCAGCA
TAAGCATTATTTAGATGAGATTATTGAGCAAATCAGTGAATTTTCTAAGCGTGTTATTTTAG
CAGATGCCAATTTAGATAAAGTTCTTAGTGCATATAACAAACATAGAGACAAACCAATACGT
GAACAAGCAGAAAATATTATTCATTTATTTACGTTGACGAATCTTGGAGCTCCCGCTGCTTT
TAAATATTTTGATACAACAATTGATCGTAAACGATATACGTCTACAAAAGAAGTTTTAGATG
CCACTCTTATCCATCAATCCATCACTGGTCTTTATGAAACACGCATTGATTTGAGTCAGCTA
GGAGGTGACTGA
MDKKYSIGLDIGTNSVGWAVITDDYKVPSKKFKVLGNTDRHSIKKNLIGALLFGSGETAEAT
RLKRTARRRYTRRKNRICYLQEIFSNEMAKVDDSFFHRLEESFLVEEDKKHERHPIFGNIVD
EVAYHEKYPTIYHLRKKLADSTDKADLRLIYLALAHMIKFRGHFLIEGDLNPDNSDVDKLFI
QLVQIYNQLFEENPINASRVDAKAILSARLSKSRRLENLIAQLPGEKRNGLFGNLIALSLGL
TPNFKSNFDLAEDAKLQLSKDTYDDDLDNLLAQIGDQYADLFLAAKNLSDAILLSDILRVNS
EITKAPLSASMIKRYDEHHQDLTLLKALVRQQLPEKYKEIFFDQSKNGYAGYIDGGASQEEF
YKFIKPILEKMDGTEELLVKLNREDLLRKQRTFDNGSIPHQIHLGELHAILRRQEDFYPFLK
DNREKIEKILTFRIPYYVGPLARGNSRFAWMTRKSEETITPWNFEEVVDKGASAQSFIERMT
NFDKNLPNEKVLPKHSLLYEYFTVYNELTKVKYVTEGMRKPAFLSGEQKKAIVDLLFKTNRK
VTVKQLKEDYFKKIECFDSVEISGVEDRFNASLGAYHDLLKIIKDKDFLDNEENEDILEDIV
LTLTLFEDRGMIEERLKTYAHLFDDKVMKQLKRRRYTGWGRLSRKLINGIRDKQSGKTILDF
LKSDGFANRNFMQLIHDDSLTFKEDIQKAQVSGQGHSLHEQIANLAGSPAIKKGILQTVKIV
DELVKVMGHKPENIVIEMARENQTTQKGQKNSRERMKRIEEGIKELGSQILKEHPVENTQLQ
NEKLYLYYLQNGRDMYVDQELDINRLSDYDVDHIVPQSFIKDDSIDNKVLTRSDKNRGKSDN
VPSEEVVKKMKNYWRQLLNAKLITQRKFDNLTKAERGGLSELDKAGFIKRQLVETRQITKHV
AQILDSRMNTKYDENDKLIREVKVITLKSKLVSDFRKDFQFYKVREINNYHHAHDAYLNAVV
GTALIKKYPKLESEFVYGDYKVYDVRKMIAKSEQEIGKATAKYFFYSNIMNFFKTEITLANG
EIRKRPLIETNGETGEIVWDKGRDFATVRKVLSMPQVNIVKKTEVQTGGFSKESILPKRNSD
KLIARKKDWDPKKYGGFDSPTVAYSVLVVAKVEKGKSKKLKSVKELLGITIMERSSFEKNPI
DFLEAKGYKEVKKDLIIKLPKYSLFELENGRKRMLASAGELQKGNELALPSKYVNFLYLASH
YEKLKGSPEDNEQKQLFVEQHKHYLDEIIEQISEFSKRVILADANLDKVLSAYNKHRDKPIR
EQAENIIHLFTLTNLGAPAAFKYFDTTIDRKRYTSTKEVLDATLIHQSITGLYETRIDLSQL
GGD
(single underline: HNH domain; double underline: RuvC domain)

[0085] In some embodiments, wild-type Cas9 corresponds to, or comprises the following nucleotide and/or amino acid sequences:

ATGGATAAAAAGTATTCTATTGGTTTAGACATCGGCACTAATTCCGTTGGATGGGCTGTCAT
AACCGATGAATACAAAGTACCTTCAAAGAAATTTAAGGTGTTGGGGAACACAGACCGTCATT
CGATTAAAAAGAATCTTATCGGTGCCCTCCTATTCGATAGTGGCGAAACGGCAGAGGCGACT
CGCCTGAAACGAACCGCTCGGAGAAGGTATACACGTCGCAAGAACCGAATATGTTACTTACA
AGAAATTTTTAGCAATGAGATGGCCAAAGTTGACGATTCTTTCTTTCACCGTTTGGAAGAGT
CCTTCCTTGTCGAAGAGGACAAGAAACATGAACGGCACCCCATCTTTGGAAACATAGTAGAT
GAGGTGGCATATCATGAAAAGTACCCAACGATTTATCACCTCAGAAAAAAGCTAGTTGACTC
AACTGATAAAGCGGACCTGAGGTTAATCTACTTGGCTCTTGCCCATATGATAAAGTTCCGTG
GGCACTTTCTCATTGAGGGTGATCTAAATCCGGACAACTCGGATGTCGACAAACTGTTCATC
CAGTTAGTACAAACCTATAATCAGTTGTTTGAAGAGAACCCTATAAATGCAAGTGGCGTGGA
TGCGAAGGCTATTCTTAGCGCCCGCCTCTCTAAATCCCGACGGCTAGAAAACCTGATCGCAC
AATTACCCGGAGAGAAGAAAAATGGGTTGTTCGGTAACCTTATAGCGCTCTCACTAGGCCTG
ACACCAAATTTTAAGTCGAACTTCGACTTAGCTGAAGATGCCAAATTGCAGCTTAGTAAGGA
CACGTACGATGACGATCTCGACAATCTACTGGCACAAATTGGAGATCAGTATGCGGACTTAT
TTTTGGCTGCCAAAAACCTTAGCGATGCAATCCTCCTATCTGACATACTGAGAGTTAATACT
GAGATTACCAAGGCGCCGTTATCCGCTTCAATGATCAAAAGGTACGATGAACATCACCAAGA
CTTGACACTTCTCAAGGCCCTAGTCCGTCAGCAACTGCCTGAGAAATATAAGGAAATATTCT
TTGATCAGTCGAAAAACGGGTACGCAGGTTATATTGACGGCGGAGCGAGTCAAGAGGAATTC
TACAAGTTTATCAAACCCATATTAGAGAAGATGGATGGGACGGAAGAGTTGCTTGTAAAACT
CAATCGCGAAGATCTACTGCGAAAGCAGCGGACTTTCGACAACGGTAGCATTCCACATCAAA
TCCACTTAGGCGAATTGCATGCTATACTTAGAAGGCAGGAGGATTTTTATCCGTTCCTCAAA
GACAATCGTGAAAAGATTGAGAAAATCCTAACCTTTCGCATACCTTACTATGTGGGACCCCT
GGCCCGAGGGAACTCTCGGTTCGCATGGATGACAAGAAAGTCCGAAGAAACGATTACTCCAT
GGAATTTTGAGGAAGTTGTCGATAAAGGTGCGTCAGCTCAATCGTTCATCGAGAGGATGACC
AACTTTGACAAGAATTTACCGAACGAAAAAGTATTGCCTAAGCACAGTTTACTTTACGAGTA
TTTCACAGTGTACAATGAACTCACGAAAGTTAAGTATGTCACTGAGGGCATGCGTAAACCCG
CCTTTCTAAGCGGAGAACAGAAGAAAGCAATAGTAGATCTGTTATTCAAGACCAACCGCAAA
GTGACAGTTAAGCAATTGAAAGAGGACTACTTTAAGAAAATTGAATGCTTCGATTCTGTCGA
GATCTCCGGGGTAGAAGATCGATTTAATGCGTCACTTGGTACGTATCATGACCTCCTAAAGA
TAATTAAAGATAAGGACTTCCTGGATAACGAAGAGAATGAAGATATCTTAGAAGATATAGTG
TTGACTCTTACCCTCTTTGAAGATCGGGAAATGATTGAGGAAAGACTAAAAACATACGCTCA
CCTGTTCGACGATAAGGTTATGAAACAGTTAAAGAGGCGTCGCTATACGGGCTGGGGACGAT
TGTCGCGGAAACTTATCAACGGGATAAGAGACAAGCAAAGTGGTAAAACTATTCTCGATTTT
CTAAAGAGCGACGGCTTCGCCAATAGGAACTTTATGCAGCTGATCCATGATGACTCTTTAAC
CTTCAAAGAGGATATACAAAAGGCACAGGTTTCCGGACAAGGGGACTCATTGCACGAACATA
TTGCGAATCTTGCTGGTTCGCCAGCCATCAAAAAGGGCATACTCCAGACAGTCAAAGTAGTG
GATGAGCTAGTTAAGGTCATGGGACGTCACAAACCGGAAAACATTGTAATCGAGATGGCACG
CGAAAATCAAACGACTCAGAAGGGGCAAAAAAACAGTCGAGAGCGGATGAAGAGAATAGAAG
AGGGTATTAAAGAACTGGGCAGCCAGATCTTAAAGGAGCATCCTGTGGAAAATACCCAATTG
CAGAACGAGAAACTTTACCTCTATTACCTACAAAATGGAAGGGACATGTATGTTGATCAGGA
ACTGGACATAAACCGTTTATCTGATTACGACGTCGATCACATTGTACCCCAATCCTTTTTGA
AGGACGATTCAATCGACAATAAAGTGCTTACACGCTCGGATAAGAACCGAGGGAAAAGTGAC
AATGTTCCAAGCGAGGAAGTCGTAAAGAAAATGAAGAACTATTGGCGGCAGCTCCTAAATGC
GAAACTGATAACGCAAAGAAAGTTCGATAACTTAACTAAAGCTGAGAGGGGTGGCTTGTCTG
AACTTGACAAGGCCGGATTTATTAAACGTCAGCTCGTGGAAACCCGCCAAATCACAAAGCAT
GTTGCACAGATACTAGATTCCCGAATGAATACGAAATACGACGAGAACGATAAGCTGATTCG
GGAAGTCAAAGTAATCACTTTAAAGTCAAAATTGGTGTCGGACTTCAGAAAGGATTTTCAAT
TCTATAAAGTTAGGGAGATAAATAACTACCACCATGCGCACGACGCTTATCTTAATGCCGTC
GTAGGGACCGCACTCATTAAGAAATACCCGAAGCTAGAAAGTGAGTTTGTGTATGGTGATTA
CAAAGTTTATGACGTCCGTAAGATGATCGCGAAAAGCGAACAGGAGATAGGCAAGGCTACAG
CCAAATACTTCTTTTATTCTAACATTATGAATTTCTTTAAGACGGAAATCACTCTGGCAAAC
GGAGAGATACGCAAACGACCTTTAATTGAAACCAATGGGGAGACAGGTGAAATCGTATGGGA
TAAGGGCCGGGACTTCGCGACGGTGAGAAAAGTTTTGTCCATGCCCCAAGTCAACATAGTAA
AGAAAACTGAGGTGCAGACCGGAGGGTTTTCAAAGGAATCGATTCTTCCAAAAAGGAATAGT
GATAAGCTCATCGCTCGTAAAAAGGACTGGGACCCGAAAAAGTACGGTGGCTTCGATAGCCC
TACAGTTGCCTATTCTGTCCTAGTAGTGGCAAAAGTTGAGAAGGGAAAATCCAAGAAACTGA
AGTCAGTCAAAGAATTATTGGGGATAACGATTATGGAGCGCTCGTCTTTTGAAAAGAACCCC
ATCGACTTCCTTGAGGCGAAAGGTTACAAGGAAGTAAAAAAGGATCTCATAATTAAACTACC
AAAGTATAGTCTGTTTGAGTTAGAAAATGGCCGAAAACGGATGTTGGCTAGCGCCGGAGAGC
TTCAAAAGGGGAACGAACTCGCACTACCGTCTAAATACGTGAATTTCCTGTATTTAGCGTCC
CATTACGAGAAGTTGAAAGGTTCACCTGAAGATAACGAACAGAAGCAACTTTTTGTTGAGCA
GCACAAACATTATCTCGACGAAATCATAGAGCAAATTTCGGAATTCAGTAAGAGAGTCATCC
TAGCTGATGCCAATCTGGACAAAGTATTAAGCGCATACAACAAGCACAGGGATAAACCCATA
CGTGAGCAGGCGGAAAATATTATCCATTTGTTTACTCTTACCAACCTCGGCGCTCCAGCCGC
ATTCAAGTATTTTGACACAACGATAGATCGCAAACGATACACTTCTACCAAGGAGGTGCTAG
ACGCGACACTGATTCACCAATCCATCACGGGATTATATGAAACTCGGATAGATTTGTCACAG
CTTGGGGGTGACGGATCCCCCAAGAAGAAGAGGAAAGTCTCGAGCGACTACAAAGACCATGA
CGGTGATTATAAAGATCATGACATCGATTACAAGGATGACGATGACAAGGCTGCAGGA
MDKKYSIGLAIGTNSVGWAVITDEYKVPSKKFKVLGNTDRHSIKKNLIGALLFDSGETAEAT
RLKRTARRRYTRRKNRICYLQEIFSNEMAKVDDSFFHRLEESFLVEEDKKHERHPIFGNIVD
EVAYHEKYPTIYHLRKKLVDSTDKADLRLIYLALAHMIKFRGHFLIEGDLNPDNSDVDKLFI
QLVQTYNQLFEENPINASGVDAKAILSARLSKSRRLENLIAQLPGEKKNGLFGNLIALSLGL
TPNFKSNFDLAEDAKLQLSKDTYDDDLDNLLAQIGDQYADLFLAAKNLSDAILLSDILRVNT
EITKAPLSASMIKRYDEHHQDLTLLKALVRQQLPEKYKEIFFDQSKNGYAGYIDGGASQEEF
YKFIKPILEKMDGTEELLVKLNREDLLRKQRTFDNGSIPHQIHLGELHAILRRQEDFYPFLK
DNREKIEKILTFRIPYYVGPLARGNSRFAWMTRKSEETITPWNFEEVVDKGASAQSFIERMT
NFDKNLPNEKVLPKHSLLYEYFTVYNELTKVKYVTEGMRKPAFLSGEQKKAIVDLLFKTNRK
VTVKQLKEDYFKKIECFDSVEISGVEDRFNASLGTYHDLLKIIKDKDFLDNEENEDILEDIV
LTLTLFEDREMIEERLKTYAHLFDDKVMKQLKRRRYTGWGRLSRKLINGIRDKQSGKTILDF
LKSDGFANRNFMQLIHDDSLTFKEDIQKAQVSGQGDSLHEHIANLAGSPAIKKGILQTVKVV
DELVKVMGRHKPENIVIEMARENQTTQKGQKNSRERMKRIEEGIKELGSQILKEHPVENTQL
QNEKLYLYYLQNGRDMYVDQELDINRLSDYDVDHIVPQSFLKDDSIDNKVLTRSDKNRGKSD
NVPSEEVVKKMKNYWRQLLNAKLITQRKFDNLTKAERGGLSELDKAGFIKRQLVETRQITKH
VAQILDSRMNTKYDENDKLIREVKVITLKSKLVSDFRKDFQFYKVREINNYHHAHDAYLNAV
VGTALIKKYPKLESEFVYGDYKVYDVRKMIAKSEQEIGKATAKYFFYSNIMNFFKTEITLAN
GEIRKRPLIETNGETGEIVWDKGRDFATVRKVLSMPQVNIVKKTEVQTGGFSKESILPKRNS
DKLIARKKDWDPKKYGGFDSPTVAYSVLVVAKVEKGKSKKLKSVKELLGITIMERSSFEKNP
IDFLEAKGYKEVKKDLIIKLPKYSLFELENGRKRMLASAGELQKGNELALPSKYVNFLYLAS
HYEKLKGSPEDNEQKQLFVEQHKHYLDEIIEQISEFSKRVILADANLDKVLSAYNKHRDKPI
REQAENIIHLFTLTNLGAPAAFKYFDTTIDRKRYTSTKEVLDATLIHQSITGLYETRIDLSQ
LGGD
(single underline: HNH domain; double underline: RuvC domain)

[0086] In some embodiments, wild-type Cas9 corresponds to Cas9 from Streptococcus pyogenes (NCBI Reference Sequence: NC_002737.2 (nucleotide sequence as follows); and Uniprot Reference Sequence: Q99ZW2 (amino acid seauence as follows).

ATGGATAAGAAATACTCAATAGGCTTAGATATCGGCACAAATAGCGTCGGATGGGCGGTGAT
CACTGATGAATATAAGGTTCCGTCTAAAAAGTTCAAGGTTCTGGGAAATACAGACCGCCACA
GTATCAAAAAAAATCTTATAGGGGCTCTTTTATTTGACAGTGGAGAGACAGCGGAAGCGACT
CGTCTCAAACGGACAGCTCGTAGAAGGTATACACGTCGGAAGAATCGTATTTGTTATCTACA
GGAGATTTTTTCAAATGAGATGGCGAAAGTAGATGATAGTTTCTTTCATCGACTTGAAGAGT
CTTTTTTGGTGGAAGAAGACAAGAAGCATGAACGTCATCCTATTTTTGGAAATATAGTAGAT
GAAGTTGCTTATCATGAGAAATATCCAACTATCTATCATCTGCGAAAAAAATTGGTAGATTC
TACTGATAAAGCGGATTTGCGCTTAATCTATTTGGCCTTAGCGCATATGATTAAGTTTCGTG
GTCATTTTTTGATTGAGGGAGATTTAAATCCTGATAATAGTGATGTGGACAAACTATTTATC
CAGTTGGTACAAACCTACAATCAATTATTTGAAGAAAACCCTATTAACGCAAGTGGAGTAGA
TGCTAAAGCGATTCTTTCTGCACGATTGAGTAAATCAAGACGATTAGAAAATCTCATTGCTC
AGCTCCCCGGTGAGAAGAAAAATGGCTTATTTGGGAATCTCATTGCTTTGTCATTGGGTTTG
ACCCCTAATTTTAAATCAAATTTTGATTTGGCAGAAGATGCTAAATTACAGCTTTCAAAAGA
TACTTACGATGATGATTTAGATAATTTATTGGCGCAAATTGGAGATCAATATGCTGATTTGT
TTTTGGCAGCTAAGAATTTATCAGATGCTATTTTACTTTCAGATATCCTAAGAGTAAATACT
GAAATAACTAAGGCTCCCCTATCAGCTTCAATGATTAAACGCTACGATGAACATCATCAAGA
CTTGACTCTTTTAAAAGCTTTAGTTCGACAACAACTTCCAGAAAAGTATAAAGAAATCTTTT
TTGATCAATCAAAAAACGGATATGCAGGTTATATTGATGGGGGAGCTAGCCAAGAAGAATTT
TATAAATTTATCAAACCAATTTTAGAAAAAATGGATGGTACTGAGGAATTATTGGTGAAACT
AAATCGTGAAGATTTGCTGCGCAAGCAACGGACCTTTGACAACGGCTCTATTCCCCATCAAA
TTCACTTGGGTGAGCTGCATGCTATTTTGAGAAGACAAGAAGACTTTTATCCATTTTTAAAA
GACAATCGTGAGAAGATTGAAAAAATCTTGACTTTTCGAATTCCTTATTATGTTGGTCCATT
GGCGCGTGGCAATAGTCGTTTTGCATGGATGACTCGGAAGTCTGAAGAAACAATTACCCCAT
GGAATTTTGAAGAAGTTGTCGATAAAGGTGCTTCAGCTCAATCATTTATTGAACGCATGACA
AACTTTGATAAAAATCTTCCAAATGAAAAAGTACTACCAAAACATAGTTTGCTTTATGAGTA
TTTTACGGTTTATAACGAATTGACAAAGGTCAAATATGTTACTGAAGGAATGCGAAAACCAG
CATTTCTTTCAGGTGAACAGAAGAAAGCCATTGTTGATTTACTCTTCAAAACAAATCGAAAA
GTAACCGTTAAGCAATTAAAAGAAGATTATTTCAAAAAAATAGAATGTTTTGATAGTGTTGA
AATTTCAGGAGTTGAAGATAGATTTAATGCTTCATTAGGTACCTACCATGATTTGCTAAAAA
TTATTAAAGATAAAGATTTTTTGGATAATGAAGAAAATGAAGATATCTTAGAGGATATTGTT
TTAACATTGACCTTATTTGAAGATAGGGAGATGATTGAGGAAAGACTTAAAACATATGCTCA
CCTCTTTGATGATAAGGTGATGAAACAGCTTAAACGTCGCCGTTATACTGGTTGGGGACGTT
TGTCTCGAAAATTGATTAATGGTATTAGGGATAAGCAATCTGGCAAAACAATATTAGATTTT
TTGAAATCAGATGGTTTTGCCAATCGCAATTTTATGCAGCTGATCCATGATGATAGTTTGAC
ATTTAAAGAAGACATTCAAAAAGCACAAGTGTCTGGACAAGGCGATAGTTTACATGAACATA
TTGCAAATTTAGCTGGTAGCCCTGCTATTAAAAAAGGTATTTTACAGACTGTAAAAGTTGTT
GATGAATTGGTCAAAGTAATGGGGCGGCATAAGCCAGAAAATATCGTTATTGAAATGGCACG
TGAAAATCAGACAACTCAAAAGGGCCAGAAAAATTCGCGAGAGCGTATGAAACGAATCGAAG
AAGGTATCAAAGAATTAGGAAGTCAGATTCTTAAAGAGCATCCTGTTGAAAATACTCAATTG
CAAAATGAAAAGCTCTATCTCTATTATCTCCAAAATGGAAGAGACATGTATGTGGACCAAGA
ATTAGATATTAATCGTTTAAGTGATTATGATGTCGATCACATTGTTCCACAAAGTTTCCTTA
AAGACGATTCAATAGACAATAAGGTCTTAACGCGTTCTGATAAAAATCGTGGTAAATCGGAT
AACGTTCCAAGTGAAGAAGTAGTCAAAAAGATGAAAAACTATTGGAGACAACTTCTAAACGC
CAAGTTAATCACTCAACGTAAGTTTGATAATTTAACGAAAGCTGAACGTGGAGGTTTGAGTG
AACTTGATAAAGCTGGTTTTATCAAACGCCAATTGGTTGAAACTCGCCAAATCACTAAGCAT
GTGGCACAAATTTTGGATAGTCGCATGAATACTAAATACGATGAAAATGATAAACTTATTCG
AGAGGTTAAAGTGATTACCTTAAAATCTAAATTAGTTTCTGACTTCCGAAAAGATTTCCAAT
TCTATAAAGTACGTGAGATTAACAATTACCATCATGCCCATGATGCGTATCTAAATGCCGTC
GTTGGAACTGCTTTGATTAAGAAATATCCAAAACTTGAATCGGAGTTTGTCTATGGTGATTA
TAAAGTTTATGATGTTCGTAAAATGATTGCTAAGTCTGAGCAAGAAATAGGCAAAGCAACCG
CAAAATATTTCTTTTACTCTAATATCATGAACTTCTTCAAAACAGAAATTACACTTGCAAAT
GGAGAGATTCGCAAACGCCCTCTAATCGAAACTAATGGGGAAACTGGAGAAATTGTCTGGGA
TAAAGGGCGAGATTTTGCCACAGTGCGCAAAGTATTGTCCATGCCCCAAGTCAATATTGTCA
AGAAAACAGAAGTACAGACAGGCGGATTCTCCAAGGAGTCAATTTTACCAAAAAGAAATTCG
GACAAGCTTATTGCTCGTAAAAAAGACTGGGATCCAAAAAAATATGGTGGTTTTGATAGTCC
AACGGTAGCTTATTCAGTCCTAGTGGTTGCTAAGGTGGAAAAAGGGAAATCGAAGAAGTTAA
AATCCGTTAAAGAGTTACTAGGGATCACAATTATGGAAAGAAGTTCCTTTGAAAAAAATCCG
ATTGACTTTTTAGAAGCTAAAGGATATAAGGAAGTTAAAAAAGACTTAATCATTAAACTACC
TAAATATAGTCTTTTTGAGTTAGAAAACGGTCGTAAACGGATGCTGGCTAGTGCCGGAGAAT
TACAAAAAGGAAATGAGCTGGCTCTGCCAAGCAAATATGTGAATTTTTTATATTTAGCTAGT
CATTATGAAAAGTTGAAGGGTAGTCCAGAAGATAACGAACAAAAACAATTGTTTGTGGAGCA
GCATAAGCATTATTTAGATGAGATTATTGAGCAAATCAGTGAATTTTCTAAGCGTGTTATTT
TAGCAGATGCCAATTTAGATAAAGTTCTTAGTGCATATAACAAACATAGAGACAAACCAATA
CGTGAACAAGCAGAAAATATTATTCATTTATTTACGTTGACGAATCTTGGAGCTCCCGCTGC
TTTTAAATATTTTGATACAACAATTGATCGTAAACGATATACGTCTACAAAAGAAGTTTTAG
ATGCCACTCTTATCCATCAATCCATCACTGGTCTTTATGAAACACGCATTGATTTGAGTCAG
CTAGGAGGTGACTGA
(SEQ ID NO: 1. single underline: HNH domain;
double underline: RuvC domain)
MDKKYSIGLDIGTNSVGWAVITDEYKVPSKKFKVLGNTDRHSIKKNLIGALLFDSGETAEAT
RLKRTARRRYTRRKNRICYLQEIFSNEMAKVDDSFFHRLEESFLVEEDKKHERHPIFGNIVD
EVAYHEKYPTIYHLRKKLVDSTDKADLRLIYLALAHMIKFRGHFLIEGDLNPDNSDVDKLFI
QLVQTYNQLFEENPINASGVDAKAILSARLSKSRRLENLIAQLPGEKKNGLFGNLIALSLGL
TPNFKSNFDLAEDAKLQLSKDTYDDDLDNLLAQIGDQYADLFLAAKNLSDAILLSDILRVNT
EITKAPLSASMIKRYDEHHQDLTLLKALVRQQLPEKYKEIFFDQSKNGYAGYIDGGASQEEF
YKFIKPILEKMDGTEELLVKLNREDLLRKQRTFDNGSIPHQIHLGELHAILRRQEDFYPFLK
DNREKIEKILTFRIPYYVGPLARGNSRFAWMTRKSEETITPWNFEEVVDKGASAQSFIERMT
NFDKNLPNEKVLPKHSLLYEYFTVYNELTKVKYVTEGMRKPAFLSGEQKKAIVDLLFKTNRK
VTVKQLKEDYFKKIECFDSVEISGVEDRFNASLGTYHDLLKIIKDKDFLDNEENEDILEDIV
LTLTLFEDREMIEERLKTYAHLFDDKVMKQLKRRRYTGWGRLSRKLINGIRDKQSGKTILDF
LKSDGFANRNFMQLIHDDSLTFKEDIQKAQVSGQGDSLHEHIANLAGSPAIKKGILQTVKVV
DELVKVMGRHKPENIVIEMARENQTTQKGQKNSRERMKRIEEGIKELGSQILKEHPVENTQL
QNEKLYLYYLQNGRDMYVDQELDINRLSDYDVDHIVPQSFLKDDSIDNKVLTRSDKNRGKSD
NVPSEEVVKKMKNYWRQLLNAKLITQRKFDNLTKAERGGLSELDKAGFIKRQLVETRQITKH
VAQILDSRMNTKYDENDKLIREVKVITLKSKLVSDFRKDFQFYKVREINNYHHAHDAYLNAV
VGTALIKKYPKLESEFVYGDYKVYDVRKMIAKSEQEIGKATAKYFFYSNIMNFFKTEITLAN
GEIRKRPLIETNGETGEIVWDKGRDFATVRKVLSMPQVNIVKKTEVQTGGFSKESILPKRNS
DKLIARKKDWDPKKYGGFDSPTVAYSVLVVAKVEKGKSKKLKSVKELLGITIMERSSFEKNP
IDFLEAKGYKEVKKDLIIKLPKYSLFELENGRKRMLASAGELQKGNELALPSKYVNFLYLAS
HYEKLKGSPEDNEQKQLFVEQHKHYLDEIIEQISEFSKRVILADANLDKVLSAYNKHRDKPI
REQAENIIHLFTLTNLGAPAAFKYFDTTIDRKRYTSTKEVLDATLIHQSITGLYETRIDLSQ
LGGD

[0087] In some embodiments, Cas9 refers to Cas9 from: Corynebacterium ulcerans (NCBI Refs: NC_015683.1, NC_017317.1); Corynebacterium diphtheria (NCBI Refs: NC_016782.1, NC_016786.1); Spiroplasma syrphidicola (NCBI Ref: NC_021284.1); Prevotella intermedia (NCBI Ref: NC_017861.1); Spiroplasma taiwanense (NCBI Ref: NC_021846.1); Streptococcus iniae (NCBI Ref: NC_021314.1); Belliella baltica (NCBI Ref: NC_018010.1); Psychroflexus torquisl (NCBI Ref: NC_018721.1); Streptococcus thermophilus (NCBI Ref: YP_820832.1), Listeria innocua (NCBI Ref: NP 472073.1), Campylobacter jejuni (NCBI Ref: YP_002344900.1) or Neisseria meningitidis (NCBI Ref: YP_002342100.1) or to a Cas9 from any other organism.

[0088] In some embodiments, the Cas9 is from Neisseria meningitidis (Nme). In some embodiments, the Cas9 is Nme1, Nme2 or Nme3. In some embodiments, the PAM-interacting domains for Nme1, Nme2 or Nme3 are N₄GAT, N₄CC, and N₄CAAA, respectively (see e.g., Edraki, A., et al., A Compact, High-Accuracy Cas9 with a Dinucleotide PAM for In Vivo Genome Editing, Molecular Cell (2018)). An exemplary Neisseria meningitidis Cas9 protein, Nme1Cas9, (NCBI Reference: WP_002235162.1; type II CRISPR RNA-guided endonuclease Cas9) has the following amino acid sequence:

| | |
|---|---|
| 1 | maafkpnpin yilgldigia svgwamveid edenpiclid lgvrvferae vpktgdslam |
| 61 | arrlarsvrr ltrrrahrll rarrllkreg vlqaadfden glikslpntp wqlraaaldr |
| 121 | kltplewsav llhlikhrgy lsqrkneget adkelgallk gvadnahalq tgdfrtpael |
| 181 | alnkfekesg hirnqrgdys htfsrkdlqa elillfekqk efgnphvsgg lkegietllm |
| 241 | tqrpalsgda vqkmlghctf epaepkaakn tytaerfiwl tklnnlrile qgserpltdt |
| 301 | eratlmdepy rkskltyaqa rkllgledta ffkglrygkd naeastlmem kayhaisral |
| 361 | ekeglkdkks plnlspelqd eigtafslfk tdeditgrlk driqpeilea llkhisfdkf |
| 421 | vqislkalrr ivplmeqgkr ydeacaeiyg dhygkkntee kiylppipad eirnpvvlra |
| 481 | lsqarkving vvrrygspar ihietarevg ksfkdrkeie krqeenrkdr ekaaakfrey |
| 541 | fpnfvgepks kdilklrlye qqhgkclysg keinlgrlne kgyveidhal pfsrtwddsf |
| 601 | nnkvlvlgse nqnkgnqtpy eyfngkdnsr ewqefkarve tsrfprskkq rillqkfded |
| 661 | gfkernlndt ryvnrflcqf vadrmrltgk gkkrvfasng qitnllrgfw glrkvraend |
| 721 | rhhaldavvv acstvamqqk itrfvrykem nafdgktidk etgevlhqkt hfpqpweffa |
| 781 | qevmirvfgk pdgkpefeea dtpeklrtll aeklssrpea vheyvtplfv srapnrkmsg |
| 841 | qghmetvksa krldegvsvl rvpltqlklk dlekmvnrer epklyealka rleahkddpa |
| 901 | kafaepfyky dkagnrtqqv kavrveqvqk tgvwvrnhng iadnatmvry dvfekgdkyy |
| 961 | lvpiyswqva kgilpdravv qgkdeedwql iddsfnfkfs lhpndlvevi tkkarmfgyf |
| 1021 | aschrgtgni nirihdldhk igkngilegi gvktalsfqk yqidelgkei rpcrlkkrpp |
| 1081 | vr |

[0089] Another exemplary Neisseria meningitidis Cas9 protein, Nme2Cas9, (NCBI Reference: WP_002230835; type II CRISPR RNA-guided endonuclease Cas9) has the following amino acid sequence:

| | |
|---|---|
| 1 | maafkpnpin yilgldigia svgwamveid eeenpirlid lgvrvferae vpktgdslam |
| 61 | arrlarsvrr ltrrrahrll rarrllkreg vlqaadfden glikslpntp wqlraaaldr |
| 121 | kltplewsav llhlikhrgy lsqrkneget adkelgallk gvannahalq tgdfrtpael |
| 181 | alnkfekesg hirnqrgdys htfsrkdlqa elillfekqk efgnphvsgg lkegietllm |
| 241 | tqrpalsgda vqkmlghctf epaepkaakn tytaerfiwl tklnnlrile qgserpltdt |
| 301 | eratlmdepy rkskltyaqa rkllgledta ffkglrygkd naeastlmem kayhaisral |
| 361 | ekeglkdkks plnlsselqd eigtafslfk tdeditgrlk drvqpeilea llkhisfdkf |
| 421 | vqislkalrr ivplmeqgkr ydeacaeiyg dhygkkntee kiylppipad eirnpvvlra |
| 481 | lsgarkving vvrrygspar ihietarevg ksfkdrkeie krqeenrkdr ekaaakfrey |
| 541 | fpnfvgepks kdilklrlye qqhgkclysg keinlvrlne kgyveidhal pfsrtwddsf |
| 601 | nnkvlvlgse nqnkgnqtpy eyfngkdnsr ewqefkarve tsrfprskkq rillqkfded |
| 661 | gfkecnlndt ryvnrflcqf vadhilltgk gkrrvfasng qitnllrgfw glrkvraend |
| 721 | rhhaldavvv acstvamqqk itrfvrykem nafdgktidk etgkvlhqkt hfpqpweffa |
| 781 | qevmirvfgk pdgkpefeea dtpeklrtll aeklssrpea vheyvtplfv srapnrkmsg |
| 841 | ahkdtlrsak rfvkhnekis vkrvwlteik ladlenmvny kngreielye alkarleayg |
| 901 | gnakqafdpk dnpfykkggq lvkavrvekt qesgvllnkk naytiadngd mvrvdvfckv |
| 961 | dkkgknqyfi vpiyawqvae nilpdidckg yriddsytfc fslhkydlia fqkdekskve |
| 1021 | fayyincdss ngrfylawhd kgskeqqfri stqnlvliqk yqvnelgkei rpcrlkkrpp |
| 1081 | vr |

[0090] In some embodiments, dCas9 corresponds to, or comprises in part or in whole, a Cas9 amino acid sequence having one or more mutations that inactivate the Cas9 nuclease activity. For example, in some embodiments, a dCas9 domain comprises D10A and an H840A mutation or corresponding mutations in another Cas9. In some embodiments, the dCas9 comprises the amino acid sequence of dCas9 (D10A and H840A):

MDKKYSIGLAIGTNSVGWAVITDEYKVPSKKFKVLGNTDRHSIKKNLIGALLFDSGETAEAT
RLKRTARRRYTRRKNRICYLQEIFSNEMAKVDDSFFHRLEESFLVEEDKKHERHPIFGNIVD
EVAYHEKYPTIYHLRKKLVDSTDKADLRLIYLALAHMIKFRGHFLIEGDLNPDNSDVDKLFI
QLVQTYNQLFEENPINASGVDAKAILSARLSKSRRLENLIAQLPGEKKNGLFGNLIALSLGL
TPNFKSNFDLAEDAKLQLSKDTYDDDLDNLLAQIGDQYADLFLAAKNLSDAILLSDILRVNT
EITKAPLSASMIKRYDEHHQDLTLLKALVRQQLPEKYKEIFFDQSKNGYAGYIDGGASQEEF
YKFIKPILEKMDGTEELLVKLNREDLLRKQRTFDNGSIPHQIHLGELHAILRRQEDFYPFLK
DNREKIEKILTFRIPYYVGPLARGNSRFAWMTRKSEETITPWNFEEVVDKGASAQSFIERMT
NFDKNLPNEKVLPKHSLLYEYFTVYNELTKVKYVTEGMRKPAFLSGEQKKAIVDLLFKTNRK
VTVKQLKEDYFKKIECFDSVEISGVEDRFNASLGTYHDLLKIIKDKDFLDNEENEDILEDIV
LTLTLFEDREMIEERLKTYAHLFDDKVMKQLKRRRYTGWGRLSRKLINGIRDKQSGKTILDF
LKSDGFANRNFMQLIHDDSLTFKEDIQKAQVSGQGDSLHEHIANLAGSPAIKKGILQTVKVV
DELVKVMGRHKPENIVIEMARENQTTQKGQKNSRERMKRIEEGIKELGSQILKEHPVENTQL
QNEKLYLYYLQNGRDMYVDQELDINRLSDYDVDAIVPQSFLKDDSIDNKVLTRSDKNRGKSD
NVPSEEVVKKMKNYWRQLLNAKLITQRKFDNLTKAERGGLSELDKAGFIKRQLVETRQITKH
VAQILDSRMNTKYDENDKLIREVKVITLKSKLVSDFRKDFQFYKVREINNYHHAHDAYLNAV
VGTALIKKYPKLESEFVYGDYKVYDVRKMIAKSEQEIGKATAKYFFYSNIMNFFKTEITLAN
GEIRKRPLIETNGETGEIVWDKGRDFATVRKVLSMPQVNIVKKTEVQTGGFSKESILPKRNS
DKLIARKKDWDPKKYGGFDSPTVAYSVLVVAKVEKGKSKKLKSVKELLGITIMERSSFEKNP
IDFLEAKGYKEVKKDLIIKLPKYSLFELENGRKRMLASAGELQKGNELALPSKYVNFLYLAS
HYEKLKGSPEDNEQKQLFVEQHKHYLDEIIEQISEFSKRVILADANLDKVLSAYNKHRDKPI
REQAENIIHLFTLTNLGAPAAFKYFDTTIDRKRYTSTKEVLDATLIHQSITGLYETRIDLSQ
LGGD

(single underline: HNH domain; double underline: RuvC domain).

[0091] In some embodiments, the Cas9 domain comprises a D10A mutation, while the residue at position 840 remains a histidine in the amino acid sequence provided above, or at corresponding positions in any of the amino acid sequences provided herein.

[0092] In other embodiments, dCas9 variants having mutations other than D10A and H840A are provided, which, e.g., result in nuclease inactivated Cas9 (dCas9). Such mutations, by way of example, include other amino acid substitutions at D10 and H840, or other substitutions within the nuclease domains of Cas9 (e.g., substitutions in the HNH nuclease subdomain and/or the RuvC1 subdomain). In some embodiments, variants or homologues of dCas9 are provided which are at least about 70% identical, at least about 80% identical, at least about 90% identical, at least about 95% identical, at least about 98% identical, at least about 99% identical, at least about 99.5% identical, or at least about 99.9% identical. In some embodiments, variants of dCas9 are provided having amino acid sequences which are shorter, or longer, by about 5 amino acids, by about 10 amino acids, by about 15 amino acids, by about 20 amino acids, by about 25 amino acids, by about 30 amino acids, by about 40 amino acids, by about 50 amino acids, by about 75 amino acids, by about 100 amino acids or more.

[0093] In some embodiments, Cas9 fusion proteins as provided herein comprise the full-length amino acid sequence of a Cas9 protein, e.g., one of the Cas9 sequences provided herein. In other embodiments, however, fusion proteins as provided herein do not comprise a full-length Cas9 sequence, but only one or more fragments thereof. Exemplary amino acid sequences of suitable Cas9 domains and Cas9 fragments are provided herein, and additional suitable sequences of Cas9 domains and fragments will be apparent to those of skill in the art.

[0094] It should be appreciated that additional Cas9 proteins (e.g., a nuclease dead Cas9 (dCas9), a Cas9 nickase (nCas9), or a nuclease active Cas9), including variants and homologs thereof, are within the scope of this disclosure. Exemplary Cas9 proteins include, without limitation, those provided below. In some embodiments, the Cas9 protein is a nuclease dead Cas9 (dCas9). In some embodiments, the Cas9 protein is a Cas9 nickase (nCas9). In some embodiments, the Cas9 protein is a nuclease active Cas9.

Exemplary catalytically inactive Cas9 (dCas9):
DKKYSIGLAIGTNSVGWAVITDEYKVPSKKFKVLGNTDRHSIKKNLIGALLFDSGETAEATR
LKRTARRRYTRRKNRICYLQEIFSNEMAKVDDSFFHRLEESFLVEEDKKHERHPIFGNIVDE
VAYHEKYPTIYHLRKKLVDSTDKADLRLIYLALAHMIKFRGHFLIEGDLNPDNSDVDKLFIQ
LVQTYNQLFEENPINASGVDAKAILSARLSKSRRLENLIAQLPGEKKNGLFGNLIALSLGLT
PNFKSNFDLAEDAKLQLSKDTYDDDLDNLLAQIGDQYADLFLAAKNLSDAILLSDILRVNTE
ITKAPLSASMIKRYDEHHQDLTLLKALVRQQLPEKYKEIFFDQSKNGYAGYIDGGASQEEFY
KFIKPILEKMDGTEELLVKLNREDLLRKQRTFDNGSIPHQIHLGELHAILRRQEDFYPFLKD
NREKIEKILTFRIPYYVGPLARGNSRFAWMTRKSEETITPWNFEEVVDKGASAQSFIERMTN
FDKNLPNEKVLPKHSLLYEYFTVYNELTKVKYVTEGMRKPAFLSGEQKKAIVDLLFKTNRKV
TVKQLKEDYFKKIECFDSVEISGVEDRFNASLGTYHDLLKIIKDKDFLDNEENEDILEDIVL
TLTLFEDREMIEERLKTYAHLFDDKVMKQLKRRRYTGWGRLSRKLINGIRDKQSGKTILDFL
KSDGFANRNFMQLIHDDSLTFKEDIQKAQVSGQGDSLHEHIANLAGSPAIKKGILQTVKVVD
ELVKVMGRHKPENIVIEMARENQTTQKGQKNSRERMKRIEEGIKELGSQILKEHPVENTQLQ
NEKLYLYYLQNGRDMYVDQELDINRLSDYDVDAIVPQSFLKDDSIDNKVLTRSDKNRGKSDN
VPSEEVVKKMKNYWRQLLNAKLITQRKFDNLTKAERGGLSELDKAGFIKRQLVETRQITKHV
AQILDSRMNTKYDENDKLIREVKVITLKSKLVSDFRKDFQFYKVREINNYHHAHDAYLNAVV
GTALIKKYPKLESEFVYGDYKVYDVRKMIAKSEQEIGKATAKYFFYSNIMNFFKTEITLANG
EIRKRPLIETNGETGEIVWDKGRDFATVRKVLSMPQVNIVKKTEVQTGGFSKESILPKRNSD
KLIARKKDWDPKKYGGFDSPTVAYSVLVVAKVEKGKSKKLKSVKELLGITIMERSSFEKNPI
DFLEAKGYKEVKKDLIIKLPKYSLFELENGRKRMLASAGELQKGNELALPSKYVNFLYLASH
YEKLKGSPEDNEQKQLFVEQHKHYLDEIIEQISEFSKRVILADANLDKVLSAYNKHRDKPIR
EQAENIIHLFTLTNLGAPAAFKYFDTTIDRKRYTSTKEVLDATLIHQSITGLYETRIDLSQL
GGD
Exemplary catalytically Cas9 nickase (nCas9):
DKKYSIGLAIGTNSVGWAVITDEYKVPSKKFKVLGNTDRHSIKKNLIGALLFDSGETAEATR
LKRTARRRYTRRKNRICYLQEIFSNEMAKVDDSFFHRLEESFLVEEDKKHERHPIFGNIVDE
VAYHEKYPTIYHLRKKLVDSTDKADLRLIYLALAHMIKFRGHFLIEGDLNPDNSDVDKLFIQ
LVQTYNQLFEENPINASGVDAKAILSARLSKSRRLENLIAQLPGEKKNGLFGNLIALSLGLT
PNFKSNFDLAEDAKLQLSKDTYDDDLDNLLAQIGDQYADLFLAAKNLSDAILLSDILRVNTE
ITKAPLSASMIKRYDEHHQDLTLLKALVRQQLPEKYKEIFFDQSKNGYAGYIDGGASQEEFY
KFIKPILEKMDGTEELLVKLNREDLLRKQRTFDNGSIPHQIHLGELHAILRRQEDFYPFLKD
NREKIEKILTFRIPYYVGPLARGNSRFAWMTRKSEETITPWNFEEVVDKGASAQSFIERMTN
FDKNLPNEKVLPKHSLLYEYFTVYNELTKVKYVTEGMRKPAFLSGEQKKAIVDLLFKTNRKV
TVKQLKEDYFKKIECFDSVEISGVEDRFNASLGTYHDLLKIIKDKDFLDNEENEDILEDIVL
TLTLFEDREMIEERLKTYAHLFDDKVMKQLKRRRYTGWGRLSRKLINGIRDKQSGKTILDFL
KSDGFANRNFMQLIHDDSLTFKEDIQKAQVSGQGDSLHEHIANLAGSPAIKKGILQTVKVVD
ELVKVMGRHKPENIVIEMARENQTTQKGQKNSRERMKRIEEGIKELGSQILKEHPVENTQLQ
NEKLYLYYLQNGRDMYVDQELDINRLSDYDVDHIVPQSFLKDDSIDNKVLTRSDKNRGKSDN
VPSEEVVKKMKNYWRQLLNAKLITQRKFDNLTKAERGGLSELDKAGFIKRQLVETRQITKHV
AQILDSRMNTKYDENDKLIREVKVITLKSKLVSDFRKDFQFYKVREINNYHHAHDAYLNAVV
GTALIKKYPKLESEFVYGDYKVYDVRKMIAKSEQEIGKATAKYFFYSNIMNFFKTEITLANG
EIRKRPLIETNGETGEIVWDKGRDFATVRKVLSMPQVNIVKKTEVQTGGFSKESILPKRNSD
KLIARKKDWDPKKYGGFDSPTVAYSVLVVAKVEKGKSKKLKSVKELLGITIMERSSFEKNPI
DFLEAKGYKEVKKDLIIKLPKYSLFELENGRKRMLASAGELQKGNELALPSKYVNFLYLASH
YEKLKGSPEDNEQKQLFVEQHKHYLDEIIEQISEFSKRVILADANLDKVLSAYNKHRDKPIR
EQAENIIHLFTLTNLGAPAAFKYFDTTIDRKRYTSTKEVLDATLIHQSITGLYETRIDLSQL
GGD
Exemplary catalytically active Cas9:
DKKYSIGLDIGTNSVGWAVITDEYKVPSKKFKVLGNTDRHSIKKNLIGALLFDSGETAEATR
LKRTARRRYTRRKNRICYLQEIFSNEMAKVDDSFFHRLEESFLVEEDKKHERHPIFGNIVDE
VAYHEKYPTIYHLRKKLVDSTDKADLRLIYLALAHMIKFRGHFLIEGDLNPDNSDVDKLFIQ
LVQTYNQLFEENPINASGVDAKAILSARLSKSRRLENLIAQLPGEKKNGLFGNLIALSLGLT
PNFKSNFDLAEDAKLQLSKDTYDDDLDNLLAQIGDQYADLFLAAKNLSDAILLSDILRVNTE
ITKAPLSASMIKRYDEHHQDLTLLKALVRQQLPEKYKEIFFDQSKNGYAGYIDGGASQEEFY
KFIKPILEKMDGTEELLVKLNREDLLRKQRTFDNGSIPHQIHLGELHAILRRQEDFYPFLKD
NREKIEKILTFRIPYYVGPLARGNSRFAWMTRKSEETITPWNFEEVVDKGASAQSFIERMTN
FDKNLPNEKVLPKHSLLYEYFTVYNELTKVKYVTEGMRKPAFLSGEQKKAIVDLLFKTNRKV
TVKQLKEDYFKKIECFDSVEISGVEDRFNASLGTYHDLLKIIKDKDFLDNEENEDILEDIVL
TLTLFEDREMIEERLKTYAHLFDDKVMKQLKRRRYTGWGRLSRKLINGIRDKQSGKTILDFL
KSDGFANRNFMQLIHDDSLTFKEDIQKAQVSGQGDSLHEHIANLAGSPAIKKGILQTVKVVD
ELVKVMGRHKPENIVIEMARENQTTQKGQKNSRERMKRIEEGIKELGSQILKEHPVENTQLQ
NEKLYLYYLQNGRDMYVDQELDINRLSDYDVDHIVPQSFLKDDSIDNKVLTRSDKNRGKSDN
VPSEEVVKKMKNYWRQLLNAKLITQRKFDNLTKAERGGLSELDKAGFIKRQLVETRQITKHV
AQILDSRMNTKYDENDKLIREVKVITLKSKLVSDFRKDFQFYKVREINNYHHAHDAYLNAVV
GTALIKKYPKLESEFVYGDYKVYDVRKMIAKSEQEIGKATAKYFFYSNIMNFFKTEITLANG
EIRKRPLIETNGETGEIVWDKGRDFATVRKVLSMPQVNIVKKTEVQTGGFSKESILPKRNSD
KLIARKKDWDPKKYGGFDSPTVAYSVLVVAKVEKGKSKKLKSVKELLGITIMERSSFEKNPI
DFLEAKGYKEVKKDLIIKLPKYSLFELENGRKRMLASAGELQKGNELALPSKYVNFLYLASH
YEKLKGSPEDNEQKQLFVEQHKHYLDEIIEQISEFSKRVILADANLDKVLSAYNKHRDKPIR
EQAENIIHLFTLTNLGAPAAFKYFDTTIDRKRYTSTKEVLDATLIHQSITGLYETRIDLSQL
GGD.

[0095] In some embodiments, Cas9 refers to a Cas9 from archaea (e.g. nanoarchaea), which constitute a domain and kingdom of single-celled prokaryotic microbes. In some embodiments, Cas9 refers to CasX or CasY, which have been described in, for example, Burstein et al., “New CRISPR-Cas systems from uncultivated microbes.” Cell Res. 2017 Feb. 21. doi: 10.1038/cr.2017.21, the entire contents of which is hereby incorporated by reference. Using genome-resolved metagenomics, a number of CRISPR-Cas systems were identified, including the first reported Cas9 in the archaeal domain of life. This divergent Cas9 protein was found in little-studied nanoarchaea as part of an active CRISPR-Cas system. In bacteria, two previously unknown systems were discovered, CRISPR-CasX and CRISPR-CasY, which are among the most compact systems yet discovered. In some embodiments, Cas9 refers to CasX, or a variant of CasX. In some embodiments, Cas9 refers to a CasY, or a variant of CasY. It should be appreciated that other RNA-guided DNA binding proteins may be used as a nucleic acid programmable DNA binding protein (napDNAbp), and are within the scope of this disclosure.

[0096] In particular embodiments, napDNAbps useful in the methods of the invention include circular permutants, which are known in the art and described, for example, by Oakes et al., Cell 176, 254-267, 2019. An exemplary circular permutant follows where the bold sequence indicates sequence derived from Cas9, the italics sequence denotes a linker sequence, and the underlined sequence denotes a bipartite nuclear localization sequence, CP5 (with MSP “NGC=Pam Variant with mutations Regular Cas9 likes NGG” PID=Protein Interacting Domain and “D10A” nickase):

EIGKATAKYFFYSNIMNFFKTEITLANGEIRKRPLIETNGETGEIVWDKGRDFATVRKVLSM
PQVNIVKKTEVQTGGFSKESILPKRNSDKLIARKKDWDPKKYGGFMQPTVAYSVLVVAKVEK
GKSKKLKSVKELLGITIMERSSFEKNPIDFLEAKGYKEVKKDLIIKLPKYSLFELENGRKRM
LASAKFLQKGNELALPSKYVNFLYLASHYEKLKGSPEDNEQKQLFVEQHKHYLDEIIEQISE
FSKRVILADANLDKVLSAYNKHRDKPIREQAENIIHLFTLTNLGAPRAFKYFDTTIARKEYR
STKEVLDATLIHQSITGLYETRIDLSQLGGDGGSGGSGGSGGSGGSGGSGGMDKKYSIGLAI
GTNSVGWAVITDEYKVPSKKFKVLGNTDRHSIKKNLIGALLFDSGETAEATRLKRTARRRYT
RRKNRICYLQEIFSNEMAKVDDSFFHRLEESFLVEEDKKHERHPIFGNIVDEVAYHEKYPTI
YHLRKKLVDSTDKADLRLIYLALAHMIKFRGHFLIEGDLNPDNSDVDKLFIQLVQTYNQLFE
ENPINASGVDAKAILSARLSKSRRLENLIAQLPGEKKNGLFGNLIALSLGLTPNFKSNFDLA
EDAKLQLSKDTYDDDLDNLLAQIGDQYADLFLAAKNLSDAILLSDILRVNTEITKAPLSASM
IKRYDEHHQDLTLLKALVRQQLPEKYKEIFFDQSKNGYAGYIDGGASQEEFYKFIKPILEKM
DGTEELLVKLNREDLLRKQRTFDNGSIPHQIHLGELHAILRRQEDFYPFLKDNREKIEKILT
FRIPYYVGPLARGNSRFAWMTRKSEETITPWNFEEVVDKGASAQSFIERMTNFDKNLPNEKV
LPKHSLLYEYFTVYNELTKVKYVTEGMRKPAFLSGEQKKAIVDLLFKTNRKVTVKQLKEDYF
KKIECFDSVEISGVEDRFNASLGTYHDLLKIIKDKDFLDNEENEDILEDIVLTLTLFEDREM
IEERLKTYAHLFDDKVMKQLKRRRYTGWGRLSRKLINGIRDKQSGKTILDFLKSDGFANRNF
MQLIHDDSLTFKEDIQKAQVSGQGDSLHEHIANLAGSPAIKKGILQTVKVVDELVKVMGRHK
PENIVIEMARENQTTQKGQKNSRERMKRIEEGIKELGSQILKEHPVENTQLQNEKLYLYYLQ
NGRDMYVDQELDINRLSDYDVDHIVPQSFLKDDSIDNKVLTRSDKNRGKSDNVPSEEVVKKM
KNYWRQLLNAKLITQRKFDNLTKAERGGLSELDKAGFIKRQLVETRQITKHVAQILDSRMNT
KYDENDKLIREVKVITLKSKLVSDFRKDFQFYKVREINNYHHAHDAYLNAVVGTALIKKYPK
LESEFVYGDYKVYDVRKMIAKSEQEGADKRTADGSEFESPKKKRKV*

[0097] Non-limiting examples of a polynucleotide programmable nucleotide binding domain which can be incorporated into a base editor include a CRISPR protein-derived domain, a restriction nuclease, a meganuclease, TAL nuclease (TALEN), and a zinc finger nuclease (ZFN).

[0098] In some embodiments, the nucleic acid programmable DNA binding protein (napDNAbp) of any of the fusion proteins provided herein may be a CasX or CasY protein. In some embodiments, the napDNAbp is a CasX protein. In some embodiments, the napDNAbp is a CasY protein. In some embodiments, the napDNAbp comprises an amino acid sequence that is at least 85%, at least 90%, at least 91%, at least 92%, at least 93%, at least 94%, at least 95%, at least 96%, at least 97%, at least 98%, at least 99%, or at ease 99.5% identical to a naturally-occurring CasX or CasY protein. In some embodiments, the napDNAbp is a naturally-occurring CasX or CasY protein. In some embodiments, the napDNAbp comprises an amino acid sequence that is at least 85%, at least 90%, at least 91%, at least 92%, at least 93%, at least 94%, at least 95%, at least 96%, at least 97%, at least 98%, at least 99%, or at ease 99.5% identical to any CasX or CasY protein described herein. It should be appreciated that Cas12b/C2c1, CasX and CasY from other bacterial species may also be used in accordance with the present disclosure.

Cas12b/C2c1 (uniprot.org/uniprot/T0D7A2#2)
sp|T0D7A2|C2C1_ALIAG CRISPR-associated endo-nuclease C2c1 OS =
Alicyclobacillus acido-terrestris (strain ATCC 49025/DSM 3922/CIP 106132/
NCIMB 13137/GD3B) GN = c2c1 PE = 1 SV = 1
MAVKSIKVKLRLDDMPEIRAGLWKLHKEVNAGVRYYTEWLSLLRQENLYRRSPNGDGEQECD
KTAEECKAELLERLRARQVENGHRGPAGSDDELLQLARQLYELLVPQAIGAKGDAQQIARKF
LSPLADKDAVGGLGIAKAGNKPRWVRMREAGEPGWEEEKEKAETRKSADRTADVLRALADFG
LKPLMRVYTDSEMSSVEWKPLRKGQAVRTWDRDMFQQAIERMMSWESWNQRVGQEYAKLVEQ
KNRFEQKNFVGQEHLVHLVNQLQQDMKEASPGLESKEQTAHYVTGRALRGSDKVFEKWGKLA
PDAPFDLYDAEIKNVQRRNTRRFGSHDLFAKLAEPEYQALWREDASFLTRYAVYNSILRKLN
HAKMFATFTLPDATAHPIWTRFDKLGGNLHQYTFLFNEFGERRHAIRFHKLLKVENGVAREV
DDVTVPISMSEQLDNLLPRDPNEPIALYFRDYGAEQHFTGEFGGAKIQCRRDQLAHMHRRRG
ARDVYLNVSVRVQSQSEARGERRPPYAAVFRLVGDNHRAFVHFDKLSDYLAEHPDDGKLGSE
GLLSGLRVMSVDLGLRTSASISVFRVARKDELKPNSKGRVPFFFPIKGNDNLVAVHERSQLL
KLPGETESKDLRAIREERQRTLRQLRTQLAYLRLLVRCGSEDVGRRERSWAKLIEQPVDAAN
HMTPDWREAFENELQKLKSLHGICSDKEWMDAVYESVRRVWRHMGKQVRDWRKDVRSGERPK
IRGYAKDVVGGNSIEQIEYLERQYKFLKSWSFFGKVSGQVIRAEKGSRFAITLREHIDHAKE
DRLKKLADRIIMEALGYVYALDERGKGKWVAKYPPCQLILLEELSEYQFNNDRPPSENNQLM
QWSHRGVFQELINQAQVHDLLVGTMYAAFSSRFDARTGAPGIRCRRVPARCTQEHNPEPFPW
WLNKFVVEHTLDACPLRADDLIPTGEGEIFVSPFSAEEGDFHQIHADLNAAQNLQQRLWSDF
DISQIRLRCDWGEVDGELVLIPRLTGKRTADSYSNKVFYTNTGVTYYERERGKKRRKVFAQE
KLSEEEAELLVEADEAREKSVVLMRDPSGIINRGNWTRQKEFWSMVNQRIEGYLVKQIRSR
VPLQDSACENTGDI
CasX (uniprot. org/uniprot/F0NN87; uniprot. org/uniprot/F0NH53)
>tr|F0NN87|F0NN87_SULIH CRISPR-associated Casx protein OS = Sulfolobus
islandicus (strain HVE10/4) GN = SiH 0402 PE = 4 SV = 1
MEVPLYNIFGDNYIIQVATEAENSTIYNNKVEIDDEELRNVLNLAYKIAKNNEDAAAERRGK
AKKKKGEEGETTTSNIILPLSGNDKNPWTETLKCYNFPTTVALSEVFKNFSQVKECEEVSAP
SFVKPEFYEFGRSPGMVERTRRVKLEVEPHYLIIAAAGWVLTRLGKAKVSEGDYVGVNVFTP
TRGILYSLIQNVNGIVPGIKPETAFGLWIARKVVSSVTNPNVSVVRIYTISDAVGQNPTTIN
GGFSIDLTKLLEKRYLLSERLEAIARNALSISSNMRERYIVLANYIYEYLTGSKRLEDLLY
FANRDLIMNLNSDDGKVRDLKLISAYVNGELIRGEG
>tr|F0NH53_F0NH53_SULIR CRISPR associated protein, Casx OS = Sulfolobus
islandicus (strain REY15A) GN = SiRe 0771 PE = 4 SV = 1
MEVPLYNIFGDNYIIQVATEAENSTIYNNKVEIDDEELRNVLNLAYKIAKNNEDAAAERRGK
AKKKKGEEGETTTSNIILPLSGNDKNPWTETLKCYNFPTTVALSEVFKNFSQVKECEEVSAP
SFVKPEFYKFGRSPGMVERTRRVKLEVEPHYLIMAAAGWVLTRLGKAKVSEGDYVGVNVFTP
TRGILYSLIQNVNGIVPGIKPETAFGLWIARKVVSSVTNPNVSVVSIYTISDAVGQNPTTIN
GGFSIDLTKLLEKRDLLSERLEAIARNALSISSNMRERYIVLANYIYEYLTGSKRLEDLLYF
ANRDLIMNLNSDDGKVRDLKLISAYVNGELIRGEG
Deltaproteobacteria CasX
MEKRINKIRKKLSADNATKPVSRSGPMKTLLVRVMTDDLKKRLEKRRKKPEVMPQVISNNAA
NNLRMLLDDYTKMKEAILQVYWQEFKDDHVGLMCKFAQPASKKIDQNKLKPEMDEKGNLTTA
GFACSQCGQPLFVYKLEQVSEKGKAYTNYFGRCNVAEHEKLILLAQLKPVKDSDEAVTYSLG
KFGQRALDFYSIHVTKESTHPVKPLAQIAGNRYASGPVGKALSDACMGTIASFLSKYQDIII
EHQKVVKGNQKRLESLRELAGKENLEYPSVTLPPQPHTKEGVDAYNEVIARVRMWVNLNLWQ
KLKLSRDDAKPLLRLKGFPSFPVVERRENEVDWWNTINEVKKLIDAKRDMGRVFWSGVTAEK
RNTILEGYNYLPNENDHKKREGSLENPKKPAKRQFGDLLLYLEKKYAGDWGKVFDEAWERID
KKIAGLTSHIEREEARNAEDAQSKAVLTDWLRAKASFVLERLKEMDEKEFYACEIQLQKWYG
DLRGNPFAVEAENRVVDISGFSIGSDGHSIQYRNLLAWKYLENGKREFYLLMNYGKKGRIRF
TDGTDIKKSGKWQGLLYGGGKAKVIDLTFDPDDEQLIILPLAFGTRQGREFIWNDLLSLETG
LIKLANGRVIEKTIYNKKIGRDEPALFVALTFERREVVDPSNIKPVNLIGVARGENIPAVIA
LTDPEGCPLPEFKDSSGGPTDILRIGEGYKEKQRAIQAAKEVEQRRAGGYSRKFASKSRNLA
DDMVRNSARDLFYHAVTHDAVLVFANLSRGFGRQGKRTFMTERQYTKMEDWLTAKLAYEGLT
SKTYLSKTLAQYTSKTCSNCGFTITYADMDVMLVRLKKTSDGWATTLNNKELKAEYQITYYN
RYKRQTVEKELSAELDRLSEESGNNDISKWTKGRRDEALFLLKKRFSHRPVQEQFVCLDCGH
EVHAAEQAALNIARSWLFLNSNSTEFKSYKSGKQPFVGAWQAFYKRRLKEVWKPNA
CasY (ncbi.nlm.nih.gov/protein/APG80656.1)
>APG80656.1 CRISPR-associated protein CasY [uncultured Parcubacteria
group bacterium]
MSKRHPRISGVKGYRLHAQRLEYTGKSGAMRTIKYPLYSSPSGGRTVPREIVSAINDDYVGL
YGLSNFDDLYNAEKRNEEKVYSVLDFWYDCVQYGAVFSYTAPGLLKNVAEVRGGSYELTKTL
KGSHLYDELQIDKVIKFLNKKEISRANGSLDKLKKDIIDCFKAEYRERHKDQCNKLADDIKN
AKKDAGASLGERQKKLFRDFFGISEQSENDKPSFTNPLNLTCCLLPFDTVNNNRNRGEVLFN
KLKEYAQKLDKNEGSLEMWEYIGIGNSGTAFSNFLGEGFLGRLRENKITELKKAMMDITDAW
RGQEQEEELEKRLRILAALTIKLREPKFDNHWGGYRSDINGKLSSWLQNYINQTVKIKEDLK
GHKKDLKKAKEMINRFGESDTKEEAVVSSLLESIEKIVPDDSADDEKPDIPAIAIYRRFLSD
GRLTLNRFVQREDVQEALIKERLEAEKKKKPKKRKKKSDAEDEKETIDFKELFPHLAKPLKL
VPNFYGDSKRELYKKYKNAAIYTDALWKAVEKIYKSAFSSSLKNSFFDTDFDKDFFIKRLQK
IFSVYRRFNTDKWKPIVKNSFAPYCDIVSLAENEVLYKPKQSRSRKSAAIDKNRVRLPSTEN
IAKAGIALARELSVAGFDWKDLLKKEEHEEYIDLIELHKTALALLLAVTETQLDISALDFVE
NGTVKDFMKTRDGNLVLEGRFLEMFSQSIVFSELRGLAGLMSRKEFITRSAIQTMNGKQAEL
LYIPHEFQSAKITTPKEMSRAFLDLAPAEFATSLEPESLSEKSLLKLKQMRYYPHYFGYELT
RTGQGIDGGVAENALRLEKSPVKKREIKCKQYKTLGRGQNKIVLYVRSSYYQTQFLEWFLHR
PKNVQTDVAVSGSFLIDEKKVKTRWNYDALTVALEPVSGSERVFVSQPFTIFPEKSAEEEGQ
RYLGIDIGEYGIAYTALEITGDSAKILDQNFISDPQLKTLREEVKGLKLDQRRGTFAMPSTK
IARIRESLVHSLRNRIHHLALKHKAKIVYELEVSRFEEGKQKIKKVYATLKKADVYSEIDAD
KNLQTTVWGKLAVASEISASYTSQFCGACKKLWRAEMQVDETITTQELIGTVRVIKGGTLID
AIKDFMRPPIFDENDTPFPKYRDFCDKHHISKKMRGNSCLFICPFCRANADADIQASQTIAL
LRYVKEEKKVEDYFERFRKLKN IKVLGQMKKI

[0099] The term “Cas12” or “Cas12 domain” refers to an RNA guided nuclease comprising a Cas12 protein or a fragment thereof (e.g., a protein comprising an active, inactive, or partially active DNA cleavage domain of Cas12, and/or the gRNA binding domain of Cas12). Cas12 belongs to the class 2, Type V CRISPR/Cas system. A Cas12 nuclease is also referred to sometimes as a CRISPR (clustered regularly interspaced short palindromic repeat) associated nuclease. The sequence of an exemplary Bacillus hisashii Cas 12b (BhCas12b) Cas 12 domain is provided below:

MAPKKKRKVGIHGVPAAATRSFILKIEPNEEVKKGLWKTHEVLNHGIAYYMNILKLIRQEAI
YEHHEQDPKNPKKVSKAEIQAELWDFVLKMQKCNSFTHEVDKDEVFNILRELYEELVPSSVE
KKGEANQLSNKFLYPLVDPNSQSGKGTASSGRKPRWYNLKIAGDPSWEEEKKKWEEDKKKDP
LAKILGKLAEYGLIPLFIPYTDSNEPIVKEIKWMEKSRNQSVRRLDKDMFIQALERFLSWES
WNLKVKEEYEKVEKEYKTLEERIKEDIQALKALEQYEKERQEQLLRDTLNTNEYRLSKRGLR
GWREIIQKWLKMDENEPSEKYLEVFKDYQRKHPREAGDYSVYEFLSKKENHFIWRNHPEYPY
LYATFCEIDKKKKDAKQQATFTLADPINHPLWVRFEERSGSNLNKYRILTEQLHTEKLKKKL
TVQLDRLIYPTESGGWEEKGKVDIVLLPSRQFYNQIFLDIEEKGKHAFTYKDESIKFPLKGT
LGGARVQFDRDHLRRYPHKVESGNVGRIYFNMTVNIEPTESPVSKSLKIHRDDFPKVVNFKP
KELTEWIKDSKGKKLKSGIESLEIGLRVMSIDLGQRQAAAASIFEVVDQKPDIEGKLFFPIK
GTELYAVHRASFNIKLPGETLVKSREVLRKAREDNLKLMNQKLNFLRNVLHFQQFEDITERE
KRVTKWISRQENSDVPLVYQDELIQIRELMYKPYKDWVAFLKQLHKRLEVEIGKEVKHWRKS
LSDGRKGLYGISLKNIDEIDRTRKFLLRWSLRPTEPGEVRRLEPGQRFAIDQLNHLNALKED
RLKKMANTIIMHALGYCYDVRKKKWQAKNPACQIILFEDLSNYNPYEERSRFENSKLMKWSR
REIPRQVALQGEIYGLQVGEVGAQFSSRFHAKTGSPGIRCSVVTKEKLQDNRFFKNLQREGR
LTLDKIAVLKEGDLYPDKGGEKFISLSKDRKCVTTHADINAAQNLQKRFWTRTHGFYKVYCK
AYQVDGQTVYIPESKDQKQKIIEEFGEGYFILKDGVYEWVNAGKLKIKKGSSKQSSSELVDS
DILKDSFDLASELKGEKLMLYRDPSGNVFPSDKWMAAGVFFGKLERILISKLTNQYSISTIE
DDSSKQSMKRPAATKKAGQAKKKK.

[0100] Amino acid sequences having at least 85% or greater identity to the BhCas12b amino acid sequence are also useful in the methods of the invention.

[0101] The term “conservative amino acid substitution” or “conservative mutation” refers to the replacement of one amino acid by another amino acid with a common property. A functional way to define common properties between individual amino acids is to analyze the normalized frequencies of amino acid changes between corresponding proteins of homologous organisms (Schulz, G. E. and Schirmer, R. H., Principles of Protein Structure, Springer-Verlag, New York (1979)). According to such analyses, groups of amino acids can be defined where amino acids within a group exchange preferentially with each other, and therefore resemble each other most in their impact on the overall protein structure (Schulz, G. E. and Schirmer, R. H., supra). Non-limiting examples of conservative mutations include amino acid substitutions of amino acids, for example, lysine for arginine and vice versa such that a positive charge can be maintained; glutamic acid for aspartic acid and vice versa such that a negative charge can be maintained; serine for threonine such that a free —OH can be maintained; and glutamine for asparagine such that a free —NH₂ can be maintained.

[0102] The term “coding sequence” or “protein coding sequence” as used interchangeably herein refers to a segment of a polynucleotide that codes for a protein. The region or sequence is bounded nearer the 5′ end by a start codon and nearer the 3′ end with a stop codon. Coding sequences can also be referred to as open reading frames.

[0103] The term “deaminase” or “deaminase domain,” as used herein, refers to a protein or enzyme that catalyzes a deamination reaction. In some embodiments, the deaminase is an adenosine deaminase, which catalyzes the hydrolytic deamination of adenine to hypoxanthine. In some embodiments, the deaminase is an adenosine deaminase, which catalyzes the hydrolytic deamination of adenosine or adenine (A) to inosine (I). In some embodiments, the deaminase or deaminase domain is an adenosine deaminase catalyzing the hydrolytic deamination of adenosine or deoxyadenosine to inosine or deoxyinosine, respectively. In some embodiments, the adenosine deaminase catalyzes the hydrolytic deamination of adenosine in deoxyribonucleic acid (DNA). The adenosine deaminases (e.g., engineered adenosine deaminases, evolved adenosine deaminases) provided herein can be from any organism, such as a bacterium. In some embodiments, the adenosine deaminase is from a bacterium, such as Escherichia coli, Staphylococcus aureus, Salmonella typhimurium, Shewanella putrefaciens, Haemophilus influenzae, or Caulobacter crescentus.

[0104] In some embodiments, the adenosine deaminase is a TadA deaminase. In some embodiments, the TadA deaminase is TadA variant. In some embodiments, the TadA variant is a TadA*8. In some embodiments, the deaminase or deaminase domain is a variant of a naturally occurring deaminase from an organism, such as a human, chimpanzee, gorilla, monkey, cow, dog, rat, or mouse. In some embodiments, the deaminase or deaminase domain does not occur in nature. For example, in some embodiments, the deaminase or deaminase domain is at least 50%, at least 55%, at least 60%, at least 65%, at least 70%, at least 75% at least 80%, at least 85%, at least 90%, at least 91%, at least 92%, at least 93%, at least 94%, at least 95%, at least 96%, at least 97%, at least 98%, at least 99%, at least 99.1%, at least 99.2%, at least 99.3%, at least 99.4%, at least 99.5%, at least 99.6%, at least 99.7%, at least 99.8%, or at least 99.9% identical to a naturally occurring deaminase. For example, deaminase domains are described in International PCT Application Nos. PCT/2017/045381 (WO 2018/027078) and PCT/US2016/058344 (WO 2017/070632), each of which is incorporated herein by reference for its entirety. Also, see Komor, A. C., et al., “Programmable editing of a target base in genomic DNA without double-stranded DNA cleavage” Nature 533, 420-424 (2016); Gaudelli, N. M., et al., “Programmable base editing of A•T to G•C in genomic DNA without DNA cleavage” Nature 551, 464-471 (2017); Komor, A. C., et al., “Improved base excision repair inhibition and bacteriophage Mu Gam protein yields C:G-to-T:A base editors with higher efficiency and product purity” Science Advances 3:eaao4774 (2017)), and Rees, H. A., et al., “Base editing: precision chemistry on the genome and transcriptome of living cells.” Nat Rev Genet. 2018 December; 19(12):770-788. doi: 10.1038/s41576-018-0059-1, the entire contents of which are hereby incorporated by reference. “Detect” refers to identifying the presence, absence or amount of the analyte to be detected. In one embodiment, a sequence alteration in a polynucleotide or polypeptide is detected. In another embodiment, the presence of indels is detected.

[0105] By “detectable label” is meant a composition that when linked to a molecule of interest renders the latter detectable, via spectroscopic, photochemical, biochemical, immunochemical, or chemical means. For example, useful labels include radioactive isotopes, magnetic beads, metallic beads, colloidal particles, fluorescent dyes, electron-dense reagents, enzymes (for example, as commonly used in an ELISA), biotin, digoxigenin, or haptens.

[0106] By “disease” is meant any condition or disorder that damages or interferes with the normal function of a cell, tissue, or organ. An example of a disease includes Glycogen Storage Disease Type 1 (also known as GSD1 or Von Gierke Disease). In some embodiments, the GSD1 is Type 1a (GSD1a).

[0107] By “effective amount” is meant the amount of a required to ameliorate the symptoms of a disease relative to an untreated patient. The effective amount of active compound(s) used to practice the present invention for therapeutic treatment of a disease varies depending upon the manner of administration, the age, body weight, and general health of the subject. Ultimately, the attending physician or veterinarian will decide the appropriate amount and dosage regimen. Such amount is referred to as an “effective” amount. In one embodiment, an effective amount is the amount of a base editor of the invention sufficient to introduce an alteration in a gene of interest (e.g., G6PC) in a cell (e.g., a cell in vitro or in vivo). In one embodiment, an effective amount is the amount of a base editor required to achieve a therapeutic effect (e.g., to reduce or control GSD1a or a symptom or condition thereof). Such therapeutic effect need not be sufficient to alter G6PC in all cells of a subject, tissue or organ, but only to alter G6PC in about 1%, 5%, 10%, 25%, 50%, 75% or more of the cells present in a subject, tissue or organ. In one embodiment, an effective amount is sufficient to ameliorate one or more symptoms of GSD1a.

[0108] By “fragment” is meant a portion of a polypeptide or nucleic acid molecule. This portion contains, at least about 10%, 20%, 30%, 40%, 50%, 60%, 70%, 80%, or 90% of the entire length of the reference nucleic acid molecule or polypeptide. A fragment may contain 10, 20, 30, 40, 50, 60, 70, 80, 90, or 100, 200, 300, 400, 500, 600, 700, 800, 900, or 1000 nucleotides or amino acids.

[0109] By “glucose-6-phosphatase (G6PC) polypeptide” is meant a polypeptide or fragment thereof having at least about 95% amino acid sequence identity to NCBI Accession No. AAA16222.1. In particular embodiments, the invention provides a method of editing a G6PC polynucleotide comprising a single nucleotide polymorphism (SNP) associated with Glycogen Storage Disease Type 1a (GSD1a). In one embodiment, the A•T to G•C alteration at the SNP associated with GSD1a changes a glutamine (Q) to a non-glutamine (X) amino acid in the G6PC polypeptide. In another embodiment, the A•T to G•C alteration at the SNP associated with GSD1a changes an arginine (R) to a non-arginine (X) in the G6PC polypeptide. In one embodiment, the SNP associated with GSD1a results in expression of an G6PC polypeptide having a non-glutamine (X) amino acid at position 347 or a non-arginine (X) amino acid at position 83. In one embodiment, the base editor correction replaces the glutamine at position 347 with a non-glutamine amino acid (X). In another embodiment, the base editor correction replaces the arginine at position 83 with a non-arginine amino acid (X). In particular embodiments, G6PC comprises one or more alterations relative to the following reference sequence. In particular embodiments, G6PC associated with GSD1a comprises one or more mutations selected from Q347X and R83C. An exemplary G6PC amino acid sequence from Homo sapiens is provided below:

| | |
|---|---|
| 1 | MEEGMNVLHD FGIQSTHYLQ VNYQDSQDWF ILVSVIADLR NAFYVLFPIW FHLQEAVGIK |
| 61 | LLWVAVIGDW LNLVFKWILF GQRPYWWVLD TDYYSNTSVP LIKQFPVTCE TGPGSPSGHA |
| 121 | MGTAGVYYVM VISTLSIFQG KIKPTYRFRC LNVILWLGFW AVQLNVCLSR IYLAAHFPHQ |
| 181 | VVAGVLSGIA VAETFSHIHS IYNASLKKYF LITFFLFSFA IGFYLLLKGL GVDLLWTLEK |
| 241 | AQRWCEQPEW VHIDTTPFAS LLKNLGTLFG LGLALNSSMY RESCKGKLSK WLPFRLSSIV |
| 301 | ASLVLLHVFD SLKPPSQVEL VFYVLSFCKS AVVPLASVSV IPYCLAQVLG QPHKKSL |

[0110] By “glucose-6-phosphatase polynucleotide” is meant a polynucleotide encoding a G6PC polypeptide. An exemplary G6PC nucleotide sequence from Homo sapiens is provided below (GenBank: U01120.1):

| | |
|---|---|
| 1 | ATAGCAGAGC AATCACCACC AAGCCTGGAA TAACTGCAAG GGCTCTGCTG ACATCTTCCT |
| 61 | GAGGTGCCAA GGAAATGAGG ATGGAGGAAG GAATGAATGT TCTCCATGAC TTTGGGATCC |
| 121 | AGTCAACACA TTACCTCCAG GTGAATTACC AAGACTCCCA GGACTGGTTC ATCTTGGTGT |
| 181 | CCGTGATCGC AGACCTCAGG AATGCCTTCT ACGTCCTCTT CCCCATCTGG TTCCATCTTC |
| 241 | AGGAAGCTGT GGGCATTAAA CTCCTTTGGG TAGCTGTGAT TGGAGACTGG CTCAACCTCG |
| 301 | TCTTTAAGTG GTAAGAACCA TATAGAGAGG AGATCAGCAA GAAAAGAGGC TGGCATTCGC |
| 361 | TCTCGCAATG TCTGTCCATC AGAAGTTGCT TTCCCCAGGC TATTCAGGAA GCCACGGGCT |
| 421 | ACTCATGCTT CCAACCCCTC TCTCTGACTT TGGATCATCT ACATAAAGGG GGAAGACAGA |
| 481 | AAAAATCCTA CCAGTGAGTT GAAAATACAG GAAAGCCTAT TTCATATGGG TTAAAGGGTA |
| 541 | GGACAGTTGA ATTTCGTGAA AAGTCTGAGT TATATAGGCT TTGAGCAAAG AGTTTTATTA |
| 601 | GTATGAAGCA GAAGAGGTAA CATAAAGAAA GATGTATGGG GCCAGGCATG GTGGCTCACA |
| 661 | CCTGTAATCC CAGCACTTTG GGAGGCCGAG GTGGGCGAAT CACTCCTGGG TGAACTCAGG |
| 721 | AGTTCAAGAC CAGCCTGGGC AACATGGCGA AACTCCATCT CTACAAAAAC ATTACGAAAA |
| 781 | TTAGCTGGGC GTGTTGGTGC TGTAGTCCCA GCTACTCAGG AGGCTGAGGT GAGAGGCGGA |
| 841 | GGAGGTTGCA GTGAGTCAAG ATCATGCCAC TGCACTCCAG CCTGGGCAAC AGAGTAAGAC |
| 901 | CCTGTCTCAA AAAAAAAAAA AAGATAGATG ATGTATGCTG TATGAAAAAA GGAAACACAC |
| 961 | AGATGATTCA ACAGCCTGTT TTGTGGGGTA ATGAAAAGTC ACCCTGGGAA CTGGGCTCCA |
| 1021 | GCCCTCGTTC TGCCACCCAC CAACTACATG TCCTTGGCAA GTCATATCAA TTATCTGAGT |
| 1081 | TTCTGTTTTA TAATCTACAA ATAGGTTATC TCTGGCAGCT TAATAATAAT CAGGGTTAAC |
| 1141 | ATTTATTAAA CAGTGTGTGC CAGTCCATGT GCTATGTGCT TTTCTGTGAG GTAGTTACTG |
| 1201 | CTATTTACAG AAACAGTAGA TGCAGAGACC AAGGTGCTGA GTTAAATGAT TAGGCCAACA |
| 1261 | AGGTTAGTAC ATGCCGAGCC AGGATGGAAG CCCAGGTAGG CAGGCTGGCT TCCGCGGCAA |
| 1321 | TGCTCTTATG AACTATGTTA CGTCCAGTGC TGATAAACTG ACTCTCTGGG GAGCAGGGGA |
| 1381 | AAGCCCTGAG TTTAGCATTT GCCAATTTCT ATCACGTAAA CATTCCCATT CTGGCCACTT |
| 1441 | TCTTTCTTTC TTTCTTTTGT TTGTTTGTTT GAGATGGAGT CTCGCACTGT TGCCTGGCTG |
| 1501 | GAGTGCAATG GTGCAATCTC AGCTCACTGC AACCTCTGCC TCTCCGGTTC AAGTGATTCT |
| 1561 | CCTGCCTCAG CCTCCCAAGT AGCTGGGATT ACAGGTGCCC GCCACCATGC CCAGCTAATT |
| 1621 | TTTTTTGTAT TTTTAGTAGA GACATGGTTT CACTATGTTG ACTAGGCTGG TCTCGAACTC |
| 1681 | CTGACCTCAT GATCTGCCTG CCTTGGCCTC CCTAAGTGCT AGGATTACAG GCGTGAGCCA |
| 1741 | CTACACCCAG CCGCATGATT CTAAAAAATA AAAAGATGAA GTGTTATTCC AAACATCTGA |
| 1801 | TCTCCATTGA AGAACCATGC AATCTCTCTG GGTTGATAGA GGCCAGAGTT AGTGGCTCTC |
| 1861 | CCTGATTTCG GTGAGAAATC ACTATTCCAC CATCACGGGA TAAAAGGCAT CCTGACTGGC |
| 1921 | GGTTGACACC TATTTCCACA GTGAAAGATA TATCTAGTAC TTTTAAAGGG GAAGTGGTTT |
| 1981 | GTCTGAGATA CTCTGTTTCA AAGTAGAGAG GATACAGAAC AAGCATCTGA AGCTATATAC |
| 2041 | ATCCTTACAG AGAGCAATTC TGATGGAAAT GCAGGCCATG TTTCCCTGGG GGGGGCTCGT |
| 2101 | CCTAGGGGCT GGAGTGCATT CTCTGATGTC AGAGGAAATG CAAGATTCCC TGAGGCCTGA |
| 2161 | GGGAACCCAT GGTATATGCA AGTCCAAGTT TCAAACTGTA GTTCCATATG CATTCTTCCA |
| 2221 | GGACAAATAC TTCTTGAGGT TAAAAAAAAA AAGTCACATA GCTGCCATTT TATGGATTTC |
| 2281 | AGGATTTTTT TTTTTTTTTT TTTGAGATGG AGTCTTGCTC TGTCACCCAG CCTGTAGTGC |
| 2341 | AGTGGCATAA TCTCGGCTCA CGGCAACCTC CGCCTCCCAG GTTCAAGCGA TTCTCTTGCC |
| 2401 | TTAGCCTCCC GAGTAGCTGG GATTACAGTC ACGCACCACC ACATCTGGCT AATTCTTTAT |
| 2461 | ATTTTTTGGT AGAAACGGTG TTTCACCATG TTGGCCAGGC TGGTCTCAAA CTCCTGACCT |
| 2521 | CATGTGATCT GCCTGCCTTG GCCTCCCAAA GTGCTGAGAT TACAGGTGTG AGCCACCGCG |
| 2581 | CCTGCCTGGA GTTCAGAATC TTGGGCTTCA TTATTTGTGT TTAAATAGAT CATACAGTCA |
| 2641 | GGCACGGTGG CTCATGCCTG TAATCCCAGC ACTTTGGGAG GCTGAGGTGG GAGGATTGCC |
| 2701 | TGAGTTCAGG AGATGGAGAC CAGCCTGGGC AACATGGTGA AACCCCGTCT CTACTAAAAA |
| 2761 | TACAAAAACT AGCTGGATGT GGTGGCACAC ACCTGTAGTC CCAGCTATTC AGGAGGCTGA |
| 2821 | GGTGGGAGGA TCCCAGGAGG TAGAGGTCAC AATGAGCCGA GATTGCGCCA CTGCACTCCA |
| 2881 | GGCTGGGTTA CTGAGCCAGA TCCTGTCTCA AAAAAAAAAA AGATAATACA TTCAAACAGT |
| 2941 | TCAAAATGCA AAAGTTACAT ACATAAGGAA GTGTCATGAA ATATCTCCCT CTCACACTTC |
| 3001 | TCCCCAGCCA CCCAGTTCTC CCTTCTAGAG GCAACATGTG AAATCCTTCT CAGGCTACAC |
| 3061 | TCTTCTTGAA GGTGTAGGCT TTGGGCAAAA GCATTCATTC AGTAACCCCA GAAACTTGTT |
| 3121 | CTGTTTTTCC ATAGGATTCT CTTTGGACAG CGTCCATACT GGTGGGTTTT GGATACTGAC |
| 3181 | TACTACAGCA ACACTTCCGT GCCCCTGATA AAGCAGTTCC CTGTAACCTG TGAGACTGGA |
| 3241 | CCAGGTAAGC GTCCCAGCCC CTGCAGACAG AAGCTGAGTG GACCTCGTTT ACCTGTTATG |
| 3301 | GATGAAACTG ACCTTGAGGG GACATGAGGA GAGCCATTCC TTTGTACTTT TGTCATGCTC |
| 3361 | TTCAATTGGC ACAAATTAAT TCACTTCTGC AATACTTTCC TGAATAGCAC AGTAGTATTG |
| 3421 | GAAATCTGCC TATTACAGAA CCTGGATGGA GTCCAGAGAG GCACGGGCAT CCATGGGCAA |
| 3481 | AGGGCTCGTG AGAGTCACCG CCCTGCAGCG CTGTGTCCTG AGAAAGGAGG GGGCAGAAGC |
| 3541 | CTGAGCTTCT GGGGGTCCTT CCCAATGGCC TGGCCCACTG GATGTGCCCT CCTGAGCTGA |
| 3601 | CCGTCCAATC CCTTGCCCTC TCTGTGCCTA CGTTTTATTA GTTACAGCCA GATGGTTACT |
| 3661 | GTCAAATCAA ATGATAGATT TCATTTTCAG TATGTAATAG GAAGCCCCTC CCTCACCCTA |
| 3721 | AAGTCTCAGC TGCCCTCTAA GACTAGTACT CTCTAAGGTA CTAGTATCCC TTCCTCAGAG |
| 3781 | ACCCTTTCCC TGACCCCAAA ACTAGGGAAG GTCCCTTAGT TATTTGCTCT CACAGACCAC |
| 3841 | GCATTTACCT CAGAGCATAT TCACTCATTC AGCTGTTACT TACCAAGCAC CTACTGGGAG |
| 3901 | CTATACACTG TTCTATGTGC TAGGGATACC TCTGTCAGTG AACAACACAG ACACAAAGAT |
| 3961 | CCCTGCCCTT GTGGAGCTGA AATCTGAATA GAGGAGGTGA AATATACAAA AATTATAATA |
| 4021 | AATAAGTAAA CTAGGCCAGT TGTGGTTGCT CATGCCTGTA ATCCCAGCAC TTTGGGAAGC |
| 4081 | CAAGGTAGGT AGATCACCTG AGGTCAGGAG TTCAAAACCA GCCTGGCCAA CATTGCAAAA |
| 4141 | TCCTGTCTTT ACTAAAAATG GAAAAATTGG TCAGGCGTGA TGGCACACGC CTGTAGTCTC |
| 4201 | AGCTACCTGG GAGGCTGAGG CAGGAGAATC GCTTGAACCT GGGAGGCAGA GGTTGCAGTG |
| 4261 | AACCGAGATC GGACCACTGC ACTCCAGCCT GAATGACAGA ACGAGACTCT GTCTCAAAAA |
| 4321 | AAAAGTAAAC TATTAATATG TAGGATAGGC CAGGCACGGT GGCTCACCCT GTAATCCCAG |
| 4381 | CACTTTGGGA GGCTGAGGCG GGTGGATCAC CTGAGGTGAG GAGTTCAAGA CCAGCCTGGC |
| 4441 | CAACATGGCA AAACCCTGTC TCTACTAAAA ATACAAAAAT TAGCTGGGTG TCCTGGTGCA |
| 4501 | TGCCTGTAAT CTGAGCTACT CAGGAGGCTA AGGCAGGAGA ATCGCTTGAA CCTGGGAGGT |
| 4561 | GGTGAGCCAA GATTGCGCCA TTGCACTCCA GCCTGGGCGA CAAAATGAGA CACCATCTGA |
| 4621 | AAAAAAAAAA AAAATATATA TATATATACA CACACACACA CACACACACA CACACACACA |
| 4681 | TATAATACTA GAAAATGATT GTTTATAGGC AAAAAAAAAA AAAAAGAAGA AGAAGAAGAA |
| 4741 | AAGGAAAGGA GAAGGAAAGA AGGACCAAAC ATCTTTTGTA GAAATATGTT TGCTTTCATC |
| 4801 | ATAACAGCTT GTTATCAAGG ATGAATTTCT CCCTGAAATT AATGGAGGCA CAGACTGGAA |
| 4861 | AGTTTAAAGT GGCTTTAAGA GGTTATTTTA TTTAGTCCTC TGTCTTAATA GAAGCAAATT |
| 4921 | ATTATCTCTG CTCCTTAGGT AGAGTAGCTA AGGCTCAGAA AGTAGGCCGG GCGCGGTGGC |
| 4981 | TCACGCCTGT AATCCTAGCA CTTTGGGAGG CCAACGCAGG TGGATCACCT GAGGTCAGGA |
| 5041 | GTTTGAGACC AGCCTGGCCA ACATGGTGAA ACCTCGTCAC TAATAAAAAA ATACAAAAAC |
| 5101 | TTAGCCAGGC ATGGTGGCGG GCGCCTGTAA TCCCAGCTAC CCAGGAGGCT GCGGCAGGAG |
| 5161 | AATCACTTCA ACCCGGGAGG CAGAGGTTGC AGTGAGCTGA AATCACACCA CTGCACTCCA |
| 5221 | GCCTTGGTGA CAGAGAAAGA TTCTGTCAGG AAAAAAAAAA AAAAGTTTAA ATGAATTACC |
| 5281 | CAAGGTATAT AATTGTTAGT GTTAGAAGGA AGAAGAAGGG AGGGAGGAAG GAAGGGAGAA |
| 5341 | AGAAAGGGAA GGAGGAAGGG AGGGAGGGAA GAAAGCCTTT ATTTATCTAT GGGGTTCCCT |
| 5401 | GGAAAGCAGG CTGAAATGGA GATTCACGTG CAGGAGTTTA GATACTCTGG GGAACTATAC |
| 5461 | TTGTAGAAGG GAAGGAACAG GAACAGGGCA GAAGGAGAGG TCCGGTTGTG ATTCTGCCTC |
| 5521 | ATCCAACCCC ACAGCGAGCT CTGAAGCTGG GGATGGCTCC TCAGAGTTGG TCCAAGTTGG |
| 5581 | GACAAGGGAA TCAGACCCTG GGGAGAGCGT AACCTTGATC AAGGCGACTC TCTTTAGCCC |
| 5641 | AGGGCAATGC CAGGAGAAGG CTGAGAGCAG AAAGCCATCT ACCATCACAC TCTCAACAGC |
| 5701 | TACGAAATAA GTCCTGCAGT TCAGGAGGGA GGTCTGGGCG GCACATCTCA GGACCCTCTA |
| 5761 | TCTCTCAGGG TAGAGGAATT AAGAATGGGA TGGGAACCAG ACGGGCCATG GTGGCTCACA |
| 5821 | CCTATAATCC CAACACTTTG GGAGGCCAAG GGTAGGAGGA TTGCTTGAGC CCAAGAGTTC |
| 5881 | AAAACCAGCC TGGGCAAAAA CAATCAAACA AACAAACAAA ACACATTTAA AAAATTTGCT |
| 5941 | GTGTGTGGTG GTGTGCACCT GTGGTCCCAG CTACTCAGGG GGCTGAGGTG GGAGGATTGC |
| 6001 | TTGAGTCCAG GAGGTCGAGG CTGCAGTGAG CTATGATCAT GGCACTGCAT TGCAGCCTAG |
| 6061 | GAGACAAAGC AAGACACTGT CTCTAAAAAA ACAAAAAACA AACAAATAAA AAAACGGAAC |
| 6121 | CGGTTGCAAG CAGGGTTAAA TAGCGTGGTC AGAGTAGGAC TCACTGAGAA TATGAGATCT |
| 6181 | GAGTCAAGTC TTCAAGGATG TGAGGAAGTA AGTTTCTGGC AGAAGAGCTG TGAAGGGCTG |
| 6241 | TCTGGCCAGA GAAGATTGCA ATGCAAAAGC CCTGAGGTGG GAACGTGTTT GGTGTGTTTA |
| 6301 | AAGGAAAGCA ATGAGGCCAG TGTAGCCAGA ACAGAGTGTG CAAGGAGAGA AGGAACAGAA |
| 6361 | GATGTGGAGG GCAGATCAGT TTGTAATTGT ACGCCCAGTA TGCTGATTCT TTGTGTAATC |
| 6421 | TCCAGACTGT ATTAAACTGC AAGAGCAGGG CCCCTCTCTG GCTTTGCTCA TCATTGTATT |
| 6481 | CCCAGAGCCT TGCACAATGC TTGGTGCATA GGAGATGGAA ATTTGTTAAA TAAATGAATT |
| 6541 | ATGGATAACG AATGGATGGT AAGATGGGTG GATGGATGGG GGGTGAACGG ATGGATGGGG |
| 6601 | GGTGAATGGA TGGATGAATG GGTAGATGGG TGGATAGGGG GATGGCTGGG TGGCTGGGTA |
| 6661 | GATGATGCAC TGTCTCCCAG ATGAGGACCT TTTCACCTTT ACTCCATTCT CTTTCCTGCC |
| 6721 | CTTTAGGGAG CCCCTCTGGC CATGCCATGG GCACAGCAGG TGTATACTAC GTGATGGTCA |
| 6781 | CATCTACTCT TTCCATCTTT CAGGGAAAGA TAAAGCCGAC CTACAGATTT CGGTAAGAAC |
| 6841 | TCACCACTGG GGTGTAGGTG GTGGAGGGCA GGAGGCAGCT CTCTCTGTAG CTGACACACC |
| 6901 | ACGTATTCTT CCTCACATCC CCCTAGCCCG CTCCCACACC TGGGCAGCCG CTGATTAAGA |
| 6961 | GTTGTGGCAC TTTGGATAGG GATAAACCTC AGAGTCAGGG AATGTTTGGG CTGAAAGGGA |
| 7021 | TCCAGTAGTG CAATCCGTTG TTTTACAGAT AAGGAAACAA AGCCCAACAC CATGAAGGGA |
| 7081 | CTTATAAAAA TAAGGTAGTG AAGTAGCAGC AGGGCTTAAA TAAAAACCCA TGTCTGTACC |
| 7141 | AACCACAGAG TCACCCATCC AGGTTAAAAT AACCAGAGAA ACAGAAGATA TTCCTACTAC |
| 7201 | AGAGAATTCC GGGTGTGCAG CCACAGTGCA AATCCTTTTT ATTTTTATTT TTGAGATGCA |
| 7261 | GTCTCGCTCT GTCATCCAGG CTGAAGTGCA GTGGCACGAT CATGTCTCGC TGCAACCTCT |
| 7321 | GCCTCCCAGG CTCAAGCGAT CCTCCCACCT CAGCCATCTG AGTAGCTGGG ACCACAGGCC |
| 7381 | ACACACCACA CCCAGCTAAT TTCTCGTATC TTTTTGTAGA GACAGAGTTC TGCTATGTTG |
| 7441 | CCCAGGCTCA GGCTGGTCTT GATCTCAAGC AATTGGCTTG CCTCAGCCTC CTAAAATATT |
| 7501 | GGGATTACAG GCATGAGCCA CCGCGCCAGC CATGCAAATC CTTAATTATC AAACAGATAA |
| 7561 | AATAGGGAAG TTAAAATTCA TATACACAAG GGTTAACCAC TTGCCACAGG CATTTTTTTT |
| 7621 | TTTTTTTTGA GACGGAATCT CGCTCTGTTG CCCAGGCTGG AGTGCAGTGG CGCCATCTCG |
| 7681 | CCTCACTGCA ACCTCCGCTT CCTGGGTTCA AGCTATTCTT CTGCCTCAGC CTACCGAGTA |
| 7741 | GCTGGGACTA CAGGCACGTG CCACCACACC TGGCTAATTT TTTTATTTTT AGTAGAGATG |
| 7801 | GGGTTTCACC ATATTGGCCA GGCTGGTCTT GAACTCCTGA CCTAGTGATC CATCCGCCTC |
| 7861 | AGCCTCCCAA AGTGCTGGGA TTGCAGGCAT GAGCCACCGC GCCTGGCCTT TTTTTTTTTT |
| 7921 | TTTTGAGACG GAGTTTTGCT CTTGTTGCCC AGGCTAGAGT GCAGTGGCGC AGTCTCGGCT |
| 7981 | CACTGTAACC TCCACCTCCT GAGTTCAAGC AATTCTCCTG CCTCAGCCTC TCAAATAGCT |
| 8041 | GGGATTACAG GCGTGAGCCA CCCCACCTGG CTAATTTTGT AATTTTTTTT TTAGTAGAGA |
| 8101 | TGGGGTTTCA CCTGTTGATC AGGCTGGTCT CAAACTCCTG ACCTCAAGTG ATCCACCCAC |
| 8161 | CTCGGCCTCC CAAAGTGCTG GGATTACAAG CATAAGCCAC CGTGCCTGGT CAATTTTGAT |
| 8221 | CTTTTTTAAA GAGACAGGGG TCTTGCTATG TTGCCCAGAC TAGTCTTGAA CTCCTGGCCT |
| 8281 | CAAGTGATCC TCTCACCTCG GCCTCCCAAA GTATTGGGAT TACAGGTCTG AGCCGCTGCA |
| 8341 | CCCAGCCCCC AACAGGCATC TTTGGACTTT TGAGTACTGG CTTTAATTTA CAAAAATTCC |
| 8401 | ACTGAGAGCA CCTAAGTTTG CCAGGCTCCA ACATTTCTGC AGGGGCTGTT TTCTTTGCTG |
| 8461 | AAGGATCTGC ACCTGTGTTC TGTTATGGTT GCCTCTTCTG TTGCAGGTGC TTGAATGTCA |
| 8521 | TTTTGTGGTT GGGATTCTGG GCTGTGCAGC TGAATGTCTG TCTGTCACGA ATCTACCTTG |
| 8581 | CTGCTCATTT TCCTCATCAA GTTGTTGCTG GAGTCCTGTC AGGTATGGGC TGATCTGACT |
| 8641 | CCCTTCCTTC TCCCCCAAAC CCCATTCCGT TTCTCTCCCT AATCAGGACA AAATCCCAGC |
| 8701 | ATTCCAGCCA CATCCTGTGT GTAATCAGTA CTGTTAGCAT TTCTGTGGGT TGAAAGTCAA |
| 8761 | GAATGAGCAA CTTGAAATGA TTAATTTCTA TAAGAGTGCC CAGATCTATA GAATGAATTG |
| 8821 | TGTAGAAGTT ACCATACATC AAATTAACGC ACCAAATTGA ATTAGCTTGA AATCTCAGAG |
| 8881 | CTTTTTACAA TCTTTATTTC TTACTGGTCT TCAACAGGCC CTAATTTACT TTTCAGGGAA |
| 8941 | TCTGCCAAAT TTAACAAATT AACACGATGT CCTAGGAAAG CTGTTCATTT AAATACATTC |
| 9001 | ATTTGCAAAC CTAATAGATA ACTGCAGTTG ATCTCTTTTA TAGGTTCAGA GTTTTGAATA |
| 9061 | TGTTTTTTTT TGTTTTTTTT TTTTGAGATG GAGTCTCGCT CTGTGACCCA GGCTAGAGTG |
| 9121 | CAGTGGTGCG ATCTCGGCTC ACTGCAAGCT CCACCTCCTG GGTTCACGCC ATTCTCCTGC |
| 9181 | CTCAGCCTCT CCGAGTAGCT GGGACTACAG GCGCCCGCCA CCATGCCCGG CTAATTTTTT |
| 9241 | GTATTTTTAG CAGAGACGGG GTTTCACCGT GGTCTTGATC TCCTGACCTC GTGATCCGCC |
| 9301 | CGCCTCGGCC TCCCAAAGCG CTGGGATTAC AAGGGTGAGC CACCGCACCC TGCCTGAATA |
| 9361 | TGTGTTTTCT TAGATCCAAT TAACAAGGGT AAGACAAGAT TTAAGTTAAG CATAAGAAAG |
| 9421 | ATTTTGTGGG AGGCACTGGA ATATAAGACC TTAACAAAAC TGTGGAATTT CTCCCCTGGA |
| 9481 | GATTTGTAAG AACGGAACAT AGCAGCATTC AAAGAAGAAT GTTGAGAACA AGGGAGATAA |
| 9541 | TGGTTTCATG GTAATCACAA AAGTAACACA GCATTTAGTA CTGGGTTCCA TGTTTGAGGA |
| 9601 | AGAACCTGGA AGCCATATCA CATGAAAAAC CTGGGAATGT TTAGGTTAGA GAGAATAACT |
| 9661 | GTGTTCAAAT GTGTGACAGA GGGACTAGAT TCATCACTTA CTAACTCCTG CAGAAAGAAC |
| 9721 | TGAGAAAAAT AGACAGTATT AGAGGGGGAC CAGTTTCACA CAGACAAGGA AGAACTATTC |
| 9781 | AGCAATCAAT TCCGTTCAAA GATAAAATGG ACTGTTATAG TGGGGGTGAG CTCCCTACCT |
| 9841 | CTGAGGGTAT TTCAAGTAGA GATAGGAGGA CCTCCTGGTA GGAAATTTGC ATACGGTGGG |
| 9901 | AGATTGTACG TGATATGGCA CCTCCATCTG AAAGAGTCTA TATTGAGGGC AGGCTGGAGT |
| 9961 | CACACATGGG AATAAGCCAG GCGACCCTCC CATCTGCCAT CTGTGATTTA ATTCCACAGT |
| 10021 | CGCAGAACGG ATGGCATGTC ACCCACTCCT CCAAACCCAC CTCTAGCAAA GGTCCCAAAT |
| 10081 | CCTTCCTATC TCTCACAGTC ATGCTTTCTT CCACTCAGGC ATTGCTGTTA CAGAAACTTT |
| 10141 | CAGCCACATC CACAGCATCT ATAATGCCAG CCTCAAGAAA TATTTTCTCA TTACCTTCTT |
| 10201 | CCTGTTCAGC TTCGCCATCG GATTTTATCT GCTGCTCAAG GGACTGGGTG TAGACCTCCT |
| 10261 | GTGGACTCTG GAGAAAGCCC AGAGGTGGTG CGAGCAGCCA GAATGGGTCC ACATTGACAC |
| 10321 | CACACCCTTT GCCAGCCTCC TCAAGAACCT GGGCACGCTC TTTGGCCTGG GGCTGGCTCT |
| 10381 | CAACTCCAGC ATGTACAGGG AGAGCTGCAA GGGGAAACTC AGCAAGTGGC TCCCATTCCG |
| 10441 | CCTCAGCTCT ATTGTAGCCT CCCTCGTCCT CCTGCACGTC TTTGACTCCT TGAAACCCCC |
| 10501 | ATCCCAAGTC GAGCTGGTCT TCTACGTCTT GTCCTTCTGC AAGAGTGCGG TAGTGCCCCT |
| 10561 | GGCATCCGTC AGTGTCATCC CCTACTGCCT CGCCCAGGTC CTGGGCCAGC CGCACAAGAA |
| 10621 | GTCGTTGTAA GAGATGTGGA GTCTTCGGTG TTTAAAGTCA ACAACCATGC CAGGGATTGA |
| 10681 | GGAGGACTAC TATTTGAAGC AATGGGCACT GGTATTTGGA GCAAGTGACA TGCCATCCAT |
| 10741 | TCTGCCGTCG TGGAATTAAA TCACGGATGG CAGATTGGAG GGTCGCCTGG CTTATTCCCA |
| 10801 | TGTGTGACTC CAGCCTGCCC TCAGCACAGA CTCTTTCAGA TGGAGGTGCC ATATCACGTA |
| 10861 | CACCATATGC AAGTTTCCCG CCAGGAGGTC CTCCTCTCTC TACTTGAATA CTCTCACAAG |
| 10921 | TAGGGAGCTC ACTCCCACTG GAACAGCCCA TTTTATCTTT GAATGGTCTT CTGCCAGCCC |
| 10981 | ATTTTGAGGC CAGAGGTGCT GTCAGCTCAG GTGGTCCTCT TTTACAATCC TAATCATATT |
| 11041 | GGGTAATGTT TTTGAAAAGC TAATGAAGCT ATTGAGAAAG ACCTGTTGCT AGAAGTTGGG |
| 11101 | TTGTTCTGGA TTTTCCCCTG AAGACTTACT TATTCTTCCG TCACATATAC AAAAGCAAGA |
| 11161 | CTTCCAGGTA GGGCCAGCTC ACAAGCCCAG GCTGGAGATC CTAACTGAGA ATTTTCTACC |
| 11221 | TGTGTTCATT CTTACCGAGA AAAGGAGAAA GGAGCTCTGA ATCTGATAGG AAAAGAAGGC |
| 11281 | TGCCTAAGGA GGAGTTTTTA GTATGTGGCG TATCATGCAA GTGCTATGCC AAGCCATGTC |
| 11341 | TAAATGGCTT TAATTATATA GTAATGCACT CTCAGTAATG GGGGACCAGC TTAAGTATAA |
| 11401 | TTAATAGATG GTTAGTGGGG TAATTCTGCT TCTAGTATTT TTTTTACTGT GCATACATGT |
| 11461 | TCATCGTATT TCCTTGGATT TCTGAATGGC TGCAGTGACC CAGATATTGC ACTAGGTCAA |
| 11521 | AACATTCAGG TATAGCTGAC ATCTCCTCTA TCACATTACA TCATCCTCCT TATAAGCCCA |
| 11581 | GCTCTGCTTT TTCCAGATTC TTCCACTGGC TCCACATCCA CCCCACTGGA TCTTCAGAAG |
| 11641 | GCTAGAGGGC GACTCTGGTG GTGCTTTTGT ATGTTTCAAT TAGGCTCTGA AATCTTGGGC |
| 11701 | AAAATGACAA GGGGAGGGCC AGGATTCCTC TCTCAGGTCA CTCCAGTGTT ACTTTTAATT |
| 11761 | CCTAGAGGGT AAATATGACT CCTTTCTCTA TCCCAAGCCA ACCAAGAGCA CATTCTTAAA |
| 11821 | GGAAAAGTCA ACATCTTCTC TCTTTTTTTT TTTTTTTGAG ACAGGGTCTC ACTATGTTGC |
| 11881 | CCAGGCTGCT CTTGAATTCC TGGGCTCAAG CAGTCCTCCC ACCCTACCAC AGCGTCCCGC |
| 11941 | GTAGCTGGGA CTACAGGTGC AAGCCACTAT GTCCAGCTAG CCAACTCCTC CTTGCCTGCT |
| 12001 | TTTCTTTTTT TTTCTTTTTT TGAGACGGCG CACCTATCAC CCAGGCTGGA GTGGAGTGGC |
| 12061 | ACGATCTTGG CTCACTGCAA CCTCTTCCTC CTGGTTCAAG CGATTCTCAT GTCTCAGCCT |
| 12121 | CCTCAGTAGC TAGGACTACC GGCGTGCACC ACCATGCCAG GCTAATTTTT ATATTTTTAG |
| 12181 | AATTTTAGAA GAGATGGGAT TTCATCATGT TGGCCAGGCT GGTCTCGAAC TCCTGACCTC |
| 12241 | AAGTGATCCA CCTGCCTTGG CCTCCCAAGG TGCTAGGATT ACAGGCATGA GCCACCGCAC |
| 12301 | CGGGCCCTCC TTGCCTGTTT TTCAATCTCA TCTGATATGC AGAGTATTTC TGCCCCACCC |
| 12361 | ACCTACCCCC CAAAAAAAGC TGAAGCCTAT TTATTTGAAA GTCCTTGTTT TTGCTACTAA |
| 12421 | TTATATAGTA TACCATACAT TATCATTCAA AACAACCATC CTGCTCATAA CATCTTTGAA |
| 12481 | AAGAAAAATA TATATGTGCA GTATTTTATT AAAGCAACAT TTTATTTAAG AATAAAGTCT |
| 12541 | TGTTAATTAC TATATTTTAG ATGCAATGTG ATCTGAAGTT TCTAATTCTG GCCCAACTAA |
| 12601 | ATTTCTAGCT CTGTTTCCCT AAACAAATAA TTTGGTTTCT CTGTGCCTGC ATTTTCCCTT |
| 12661 | TGGAGAAGAA AAGTGCTCTC TCTTGAGTTG ACCGAGAGTC CCATTAGGGA TAGGGAGACT |
| 12721 | TAAATGCATC CACAGGGGCA CAGGCAGAGT TGAGCACATA AACGGAGGCC CAAAATCAGC |
| 12781 | ATAGAACCAG AAAGATTCAG AGTTGGCCAA GAATGAACAT TGGCTACCAG ACCACAAGTC |
| 12841 | AGCATGAGTT GCTCTATGGC ATCAAATTGC AACTTGAGAG TAGATGGGCA GGGTCACTAT |
| 12901 | CAAATTAAGC AATCAGGGCA CACAAGTTGC AGTAACACAA CAAGACTAGG CCAGCTCTGG |
| 12961 | AATCCAGTAA CTCAGTGTCA GCAAGGTTTT GGGTTATAGT TCAAGAAAGT CTAAACAGAG |
| 13021 | CCAGTCACAG CACCAAGGAA TGCTCAAGGG AGCTATTGCA GGTTTCTCTG CTAAGAGATT |
| 13081 | TATTTCATCC TGGGTGCAGG GTTCGACCTC CAAAGGCCTC AAATCATCAC CGTATCAATG |
| 13141 | GATTTCCTGA GGGTAAGCTC CGCTATTTCA CACCTGAACT CCGGAGTCTG TATATTCAGG |
| 13201 | GAAGATTGCA TTCTCCTACT GGATTTGGGC TCTCAGAGGG CGTTGTGGGA ACCAGGCCCC |
| 13261 | TCACAGAATC AAATGGTCCC AACCAGGGAG AAAGAAAATA GTCTTTTTTT TTTTTTTAAT |
| 13321 | AGAGATGGGG GTCTCACTAT GCTGCCCAGG CTGGTCTTGA ACTCCTGGGT TCAAGTGATC |
| 13381 | CTCCTGCCTC AGCCTCCCAA AGTGCTGGGA TTACAGTGTG AGCCACTGCG CTTGGCCAGA |
| 13441 | AATGGTTTTG ATCTGTCTGA ACTGAACCCT ACTGCTTAGG CATAGCCCCA TCCTTGATAA |
| 13501 | TCTATTTGCT CCCAAGGACC AAGTCCAAGA TCCTTACAAG AAAGGTCTGC CAGAAAGTAA |
| 13561 | ATACTGCCCC CACTCCCTGA AGTTTATGAG GTTGATAAGA AAACATAACA GATAAAGTTT |
| 13621 | ATTGAGTGCT AACTTTA |

[0111] By “guide RNA” or “gRNA” is meant a polynucleotide which can be specific for a target sequence and can form a complex with a polynucleotide programmable nucleotide binding domain protein (e.g., Cas9 or Cpf1). In an embodiment, the guide polynucleotide is a guide RNA (gRNA). gRNAs can exist as a complex of two or more RNAs, or as a single RNA molecule. gRNAs that exist as a single RNA molecule may be referred to as single-guide RNAs (sgRNAs), though “gRNA” is used interchangeably to refer to guide RNAs that exist as either single molecules or as a complex of two or more molecules. Typically, gRNAs that exist as single RNA species comprise two domains: (1) a domain that shares homology to a target nucleic acid (e.g., and directs binding of a Cas9 complex to the target); and (2) a domain that binds a Cas9 protein. In some embodiments, domain (2) corresponds to a sequence known as a tracrRNA, and comprises a stem-loop structure. For example, in some embodiments, domain (2) is identical or homologous to a tracrRNA as provided in Jinek et al., Science 337:816-821(2012), the entire contents of which is incorporated herein by reference. Other examples of gRNAs (e.g., those including domain 2) can be found in U.S. Provisional Patent Application, U.S. Ser. No. 61/874,682, filed Sep. 6, 2013, entitled

[0112] “Switchable Cas9 Nucleases and Uses Thereof,” and U.S. Provisional Patent Application, U.S. Ser. No. 61/874,746, filed Sep. 6, 2013, entitled “Delivery System For Functional Nucleases,” the entire contents of each are hereby incorporated by reference in their entirety. In some embodiments, a gRNA comprises two or more of domains (1) and (2), and may be referred to as an “extended gRNA.” An extended gRNA will bind two or more Cas9 proteins and bind a target nucleic acid at two or more distinct regions, as described herein. The gRNA comprises a nucleotide sequence that complements a target site, which mediates binding of the nuclease/RNA complex to said target site, providing the sequence specificity of the nuclease:RNA complex. As will be appreciated by those skilled in the art, RNA polynucleotide sequences, e.g., gRNA sequences, include the nucleobase uracil (U), a pyrimidine derivative, rather than the nucleobase thymine (T), which is included in DNA polynucleotide sequences. In RNA, uracil base-pairs with adenine and replaces thymine during DNA transcription.

[0113] By “heterodimer” is meant a fusion protein comprising two domains, such as a wild type TadA domain and a variant of TadA domain (e.g., TadA*8) or two variant TadA domains (e.g., TadA*7.10 and TadA*8 or two TadA*8 domains).

[0114] “Hybridization” means hydrogen bonding, which may be Watson-Crick, Hoogsteen or reversed Hoogsteen hydrogen bonding, between complementary nucleobases. For example, adenine and thymine are complementary nucleobases that pair through the formation of hydrogen bonds.

[0115] The term “inhibitor of base repair” or “IBR” refers to a protein that is capable in inhibiting the activity of a nucleic acid repair enzyme, for example a base excision repair (BER) enzyme. In some embodiments, the IBR is an inhibitor of inosine base excision repair. Exemplary inhibitors of base repair include inhibitors of APE1, Endo III, Endo IV, Endo V, Endo VIII, Fpg, hOGG1, hNEIL1, T7 Endo1, T4PDG, UDG, hSMUG1, and hAAG. In some embodiments, the IBR is an inhibitor of Endo V or hAAG. In some embodiments, the IBR is a catalytically inactive EndoV or a catalytically inactive hAAG. In some embodiments, the base repair inhibitor is an inhibitor of Endo V or hAAG. In some embodiments, the base repair inhibitor is a catalytically inactive EndoV or a catalytically inactive hAAG.

[0116] In some embodiments, the base repair inhibitor is uracil glycosylase inhibitor (UGI). UGI refers to a protein that is capable of inhibiting a uracil-DNA glycosylase base-excision repair enzyme. In some embodiments, a UGI domain comprises a wild-type UGI or a fragment of a wild-type UGI. In some embodiments, the UGI proteins provided herein include fragments of UGI and proteins homologous to a UGI or a UGI fragment. In some embodiments, the base repair inhibitor is an inhibitor of inosine base excision repair. In some embodiments, the base repair inhibitor is a “catalytically inactive inosine specific nuclease” or “dead inosine specific nuclease. Without wishing to be bound by any particular theory, catalytically inactive inosine glycosylases (e.g., alkyl adenine glycosylase (AAG)) can bind inosine, but cannot create an abasic site or remove the inosine, thereby sterically blocking the newly formed inosine moiety from DNA damage/repair mechanisms. In some embodiments, the catalytically inactive inosine specific nuclease can be capable of binding an inosine in a nucleic acid but does not cleave the nucleic acid. Non-limiting exemplary catalytically inactive inosine specific nucleases include catalytically inactive alkyl adenosine glycosylase (AAG nuclease), for example, from a human, and catalytically inactive endonuclease V (EndoV nuclease), for example, from E. coli. In some embodiments, the catalytically inactive AAG nuclease comprises an E125Q mutation or a corresponding mutation in another AAG nuclease.

[0117] By “increases” is meant a positive alteration of at least 10%, 25%, 50%, 75%, or 100%.

[0118] An “intein” is a fragment of a protein that is able to excise itself and join the remaining fragments (the exteins) with a peptide bond in a process known as protein splicing. Inteins are also referred to as “protein introns.” The process of an intein excising itself and joining the remaining portions of the protein is herein termed “protein splicing” or “intein-mediated protein splicing.” In some embodiments, an intein of a precursor protein (an intein containing protein prior to intein-mediated protein splicing) comes from two genes. Such intein is referred to herein as a split intein (e.g., split intein-N and split intein-C). For example, in cyanobacteria, DnaE, the catalytic subunit a of DNA polymerase III, is encoded by two separate genes, dnaE-n and dnaE-c. The intein encoded by the dnaE-n gene may be herein referred as “intein-N.” The intein encoded by the dnaE-c gene may be herein referred as “intein-C.”

[0119] Other intein systems may also be used. For example, a synthetic intein based on the dnaE intein, the Cfa-N (e.g., split intein-N) and Cfa-C (e.g., split intein-C) intein pair, has been described (e.g., in Stevens et al., J Am Chem Soc. 2016 Feb. 24; 138(7):2162-5, incorporated herein by reference). Non-limiting examples of intein pairs that may be used in accordance with the present disclosure include: Cfa DnaE intein, Ssp GyrB intein, Ssp DnaX intein, Ter DnaE3 intein, Ter ThyX intein, Rma DnaB intein and Cne Prp8 intein (e.g., as described in U.S. Pat. No. 8,394,604, incorporated herein by reference. Exemplary nucleotide and amino acid sequences of inteins are provided.

DnaE Intein-N DNA:
TGCCTGTCATACGAAACCGAGATACTGACAGTAGAATATGGCCTTCTGCCAATCGGGAAGAT
TGTGGAGAAACGGATAGAATGCACAGTTTACTCTGTCGATAACAATGGTAACATTTATACTC
AGCCAGTTGCCCAGTGGCACGACCGGGGAGAGCAGGAAGTATTCGAATACTGTCTGGAGGAT
GGAAGTCTCATTAGGGCCACTAAGGACCACAAATTTATGACAGTCGATGGCCAGATGCTGCC
TATAGACGAAATCTTTGAGCGAGAGTTGGACCTCATGCGAGTTGACAACCTTCCTAT
DnaE Intein-N Protein:
CLSYETEILTVEYGLLPIGKIVEKRIECTVYSVDNNGNIYTQPVAQWHDR
GEQEVFEYCLEDGSLIRATKDHKFMTVDGQMLPIDEIFERELDLMRVDNLPN
DnaE Intein-C DNA:
ATGATCAAGATAGCTACAAGGAAGTATCTTGGCAAACAAAACGTTTATGA
TATTGGAGTCGAAAGAGATCACAACTTTGCTCTGAAGAACGGATTCATAGCTICTAT
Intein-C:
MIKIATRKYLGKQNVYDIGVERDHNFALKNGFIASN
Cfa-N DNA:
TGCCTGTCTTATGATACCGAGATACTTACCGTTGAATATGGCTTCTTGCCTATTGGAAAGAT
TGTCGAAGAGAGAATTGAATGCACAGTATATACTGTAGACAAGAATGGTTTCGTTTACACAC
AGCCCATTGCTCATGGCACAATCGCGGCGAACAAGAAGTATTTGAGTACTGICTCGAGGAT
GGAAGCATCATACGAGCAACTAAAGATCATAAATTCATGACCACTGACGGGCAGATGTTGCC
AATAGATGAGATATTCGAGCGGGGCTTGGATCTCAAACAAGTGGATGGATTGCCA
Cfa-N Protein:
CLSYDTEILTVEYGFLPIGKIVEERIECTVYTVDKNGFVYTQPIAQWHNRGEQEVFEYCLED
GSIIRATKDHKFMTTDGQMLPIDEIFERGLDLKQVDGLP
Cfa-C DNA:
ATGAAGAGGACTGCCGATGGATCAGAGTTTGAATCTCCCAAGAAGAAGAGGAAAGTAAAGAT
AATATCTCGAAAAAGTCTTGGTACCCAAAATGTCTATGATATTGGAGTGGAGAAAGATCACA
ACTTCCITCTCAAGAACGGTCTCGTAGCCAGCAAC
Cfa-C Protein:
MKRTADGSEFESPKKKRKVKIISRKSLGTQNVYDIGVEKDHNFLLKNGLVASN

[0120] Intein-N and intein-C may be fused to the N-terminal portion of the split Cas9 and the C-terminal portion of the split Cas9, respectively, for the joining of the N-terminal portion of the split Cas9 and the C-terminal portion of the split Cas9. For example, in some embodiments, an intein-N is fused to the C-terminus of the N-terminal portion of the split Cas9, i.e., to form a structure of N-[N-terminal portion of the split Cas9]-[intein-N]-C. In some embodiments, an intein-C is fused to the N-terminus of the C-terminal portion of the split Cas9, i.e., to form a structure of N-[intein-C]-[C-terminal portion of the split Cas9]-C. The mechanism of intein-mediated protein splicing for joining the proteins the inteins are fused to (e.g., split Cas9) is known in the art, e.g., as described in Shah et al., Chem Sci. 2014; 5(1):446-461, incorporated herein by reference. Methods for designing and using inteins are known in the art and described, for example by WO2014004336, WO2017132580, US20150344549, and US20180127780, each of which is incorporated herein by reference in their entirety.

[0121] The terms “isolated,” “purified,” or “biologically pure” refer to material that is free to varying degrees from components which normally accompany it as found in its native state. “Isolate” denotes a degree of separation from original source or surroundings. “Purify” denotes a degree of separation that is higher than isolation. A “purified” or “biologically pure” protein is sufficiently free of other materials such that any impurities do not materially affect the biological properties of the protein or cause other adverse consequences. That is, a nucleic acid or peptide of this invention is purified if it is substantially free of cellular material, viral material, or culture medium when produced by recombinant DNA techniques, or chemical precursors or other chemicals when chemically synthesized. Purity and homogeneity are typically determined using analytical chemistry techniques, for example, polyacrylamide gel electrophoresis or high-performance liquid chromatography. The term “purified” can denote that a nucleic acid or protein gives rise to essentially one band in an electrophoretic gel. For a protein that can be subjected to modifications, for example, phosphorylation or glycosylation, different modifications may give rise to different isolated proteins, which can be separately purified.

[0122] By “isolated polynucleotide” is meant a nucleic acid (e.g., a DNA) that is free of the genes which, in the naturally-occurring genome of the organism from which the nucleic acid molecule of the invention is derived, flank the gene. The term therefore includes, for example, a recombinant DNA that is incorporated into a vector; into an autonomously replicating plasmid or virus; or into the genomic DNA of a prokaryote or eukaryote; or that exists as a separate molecule (for example, a cDNA or a genomic or cDNA fragment produced by PCR or restriction endonuclease digestion) independent of other sequences. In addition, the term includes an RNA molecule that is transcribed from a DNA molecule, as well as a recombinant DNA that is part of a hybrid gene encoding additional polypeptide sequence.

[0123] By an “isolated polypeptide” is meant a polypeptide of the invention that has been separated from components that naturally accompany it. Typically, the polypeptide is isolated when it is at least 60%, by weight, free from the proteins and naturally-occurring organic molecules with which it is naturally associated. Preferably, the preparation is at least 75%, more preferably at least 90%, and most preferably at least 99%, by weight, a polypeptide of the invention. An isolated polypeptide of the invention may be obtained, for example, by extraction from a natural source, by expression of a recombinant nucleic acid encoding such a polypeptide; or by chemically synthesizing the protein. Purity can be measured by any appropriate method, for example, column chromatography, polyacrylamide gel electrophoresis, or by HPLC analysis.

[0124] The term “linker,” as used herein, can refer to a covalent linker (e.g., covalent bond), a non-covalent linker, a chemical group, or a molecule linking two molecules or moieties, e.g., two components of a protein complex or a ribonucleocomplex, or two domains of a fusion protein, such as, for example, a polynucleotide programmable DNA binding domain (e.g., dCas9) and a deaminase domain (e.g., an adenosine deaminase). A linker can join different components of, or different portions of components of, a base editor system. For example, in some embodiments, a linker can join a guide polynucleotide binding domain of a polynucleotide programmable nucleotide binding domain and a catalytic domain of a deaminase. In some embodiments, a linker can join a CRISPR polypeptide and a deaminase. In some embodiments, a linker can join a Cas9 and a deaminase. In some embodiments, a linker can join a dCas9 and a deaminase. In some embodiments, a linker can join a nCas9 and a deaminase. In some embodiments, a linker can join a guide polynucleotide and a deaminase. In some embodiments, a linker can join a deaminating component and a polynucleotide programmable nucleotide binding component of a base editor system. In some embodiments, a linker can join a RNA-binding portion of a deaminating component and a polynucleotide programmable nucleotide binding component of a base editor system. In some embodiments, a linker can join a RNA-binding portion of a deaminating component and a RNA-binding portion of a polynucleotide programmable nucleotide binding component of a base editor system. A linker can be positioned between, or flanked by, two groups, molecules, or other moieties and connected to each one via a covalent bond or non-covalent interaction, thus connecting the two. In some embodiments, the linker can be an organic molecule, group, polymer, or chemical moiety. In some embodiments, the linker can be a polynucleotide. In some embodiments, the linker can be a DNA linker. In some embodiments, the linker can be a RNA linker. In some embodiments, a linker can comprise an aptamer capable of binding to a ligand. In some embodiments, the ligand may be carbohydrate, a peptide, a protein, or a nucleic acid. In some embodiments, the linker may comprise an aptamer may be derived from a riboswitch. The riboswitch from which the aptamer is derived may be selected from a theophylline riboswitch, a thiamine pyrophosphate (TPP) riboswitch, an adenosine cobalamin (AdoCb1) riboswitch, an S-adenosyl methionine (SAM) riboswitch, an SAH riboswitch, a flavin mononucleotide (FMN) riboswitch, a tetrahydrofolate riboswitch, a lysine riboswitch, a glycine riboswitch, a purine riboswitch, a GlmS riboswitch, or a pre-queosinel (PreQ1) riboswitch. In some embodiments, a linker may comprise an aptamer bound to a polypeptide or a protein domain, such as a polypeptide ligand. In some embodiments, the polypeptide ligand may be a K Homology (KH) domain, a MS2 coat protein domain, a PP7 coat protein domain, a SfMu Com coat protein domain, a sterile alpha motif, a telomerase Ku binding motif and Ku protein, a telomerase Sm7 binding motif and Sm7 protein, or a RNA recognition motif. In some embodiments, the polypeptide ligand may be a portion of a base editor system component. For example, a nucleobase editing component may comprise a deaminase domain and a RNA recognition motif.

[0125] In some embodiments, the linker can be an amino acid or a plurality of amino acids (e.g., a peptide or protein). In some embodiments, the linker can be about 5-100 amino acids in length, for example, about 5, 6, 7, 8, 9, 10, 11, 12, 13, 14, 15, 16, 17, 18, 19, 20, 20-30, 30-40, 40-50, 50-60, 60-70, 70-80, 80-90, or 90-100 amino acids in length. In some embodiments, the linker can be about 100-150, 150-200, 200-250, 250-300, 300-350, 350-400, 400-450, or 450-500 amino acids in length. Longer or shorter linkers can be also contemplated.

[0126] In some embodiments, a linker joins a gRNA binding domain of an RNA-programmable nuclease, including a Cas9 nuclease domain, and the catalytic domain of a nucleic-acid editing protein (e.g., adenosine deaminase). In some embodiments, a linker joins a dCas9 and a nucleic-acid editing protein. For example, the linker is positioned between, or flanked by, two groups, molecules, or other moieties and connected to each one via a covalent bond, thus connecting the two. In some embodiments, the linker is an amino acid or a plurality of amino acids (e.g., a peptide or protein). In some embodiments, the linker is an organic molecule, group, polymer, or chemical moiety. In some embodiments, the linker is 5-200 amino acids in length, for example, 5, 6, 7, 8, 9, 10, 11, 12, 13, 14, 15, 16, 17, 18, 19, 20, 25, 35, 45, 50, 55, 60, 60, 65, 70, 70, 75, 80, 85, 90, 90, 95, 100, 101, 102, 103, 104, 105, 110, 120, 130, 140, 150, 160, 175, 180, 190, or 200 amino acids in length. Longer or shorter linkers are also contemplated.

[0127] In some embodiments, the domains of the nucleobase editor are fused via a linker that comprises the amino acid sequence of SGGSSGSETPGTSESATPESSGGS, SGGSSGGSSGSETPGTSESATPESSGGSSGGS, or GGSGGSPGSPAGSPTSTEEGTSESATPESGPGTSTEPSEGSAPGSPAGSPTSTEEGTSTE PSEGSAPGTSTEPSEGSAPGTSESATPESGPGSEPATSGGSGGS. In some embodiments, domains of the nucleobase editor are fused via a linker comprising the amino acid sequence SGSETPGTSESATPES, which may also be referred to as the XTEN linker. In some embodiments, a linker comprises the amino acid sequence SGGS. In some embodiments, a linker comprises (SGGS)ₙ, (GGGS)ₙ, (GGGGS) n, (G)ₙ, (EAAAK)ₙ, (GGS)ₙ, SGSETPGTSESATPES, or (XP)ₙ motif, or a combination of any of these, wherein n is independently an integer between 1 and 30, and wherein X is any amino acid. In some embodiments, n is 1, 2, 3, 4, 5, 6, 7, 8, 9, 10, 11, 12, 13, 14, or 15.

[0128] In some embodiments, the linker is 24 amino acids in length. In some embodiments, the linker comprises the amino acid sequence SGGSSGGSSGSETPGTSESATPES. In some embodiments, the linker is 40 amino acids in length. In some embodiments, the linker comprises the amino acid sequence SGGSSGGSSGSETPGTSESATPESSGGSSGGSSGGSSGGS. In some embodiments, the linker is 64 amino acids in length. In some embodiments, the linker comprises the amino acid sequence SGGSSGGSSGSETPGTSESATPESSGGSSGGSSGGSSGGSSGSETPGTSESATPESSGGS SGGS. In some embodiments, the linker is 92 amino acids in length. In some embodiments, the linker comprises the amino acid sequence PGSPAGSPTSTEEGTSESATPESGPGTSTEPSEGSAPGSPAGSPTSTEEGTSTEPSEGSAPG TSTEPSEGSAPGTSESATPESGPGSEPATS.

[0129] By “marker” is meant any protein or polynucleotide having an alteration in expression level or activity that is associated with a disease or disorder.

[0130] The term “mutation,” as used herein, refers to a substitution of a residue within a sequence, e.g., a nucleic acid or amino acid sequence, with another residue, or a deletion or insertion of one or more residues within a sequence. Mutations are typically described herein by identifying the original residue followed by the position of the residue within the sequence and by the identity of the newly substituted residue. Various methods for making the amino acid substitutions (mutations) provided herein are well known in the art, and are provided by, for example, Green and Sambrook, Molecular Cloning: A Laboratory Manual (4th ed., Cold Spring Harbor Laboratory Press, Cold Spring Harbor, N.Y. (2012)). In some embodiments, the presently disclosed base editors can efficiently generate an “intended mutation,” such as a point mutation, in a nucleic acid (e.g., a nucleic acid within a genome of a subject) without generating a significant number of unintended mutations, such as unintended point mutations. In some embodiments, an intended mutation is a mutation that is generated by a specific base editor (e.g., adenosine base editor) bound to a guide polynucleotide (e.g., gRNA), specifically designed to generate the intended mutation.

[0131] In general, mutations made or identified in a sequence (e.g., an amino acid sequence as described herein) are numbered in relation to a reference (or wild-type) sequence, i.e., a sequence that does not contain the mutations. The skilled practitioner in the art would readily understand how to determine the position of mutations in amino acid and nucleic acid sequences relative to a reference sequence.

[0132] The term “non-conservative mutations” involve amino acid substitutions between different groups, for example, lysine for tryptophan, or phenylalanine for serine, etc. In this case, it is preferable for the non-conservative amino acid substitution to not interfere with, or inhibit the biological activity of, the functional variant. The non-conservative amino acid substitution can enhance the biological activity of the functional variant, such that the biological activity of the functional variant is increased as compared to the wild-type protein.

[0133] The term “nuclear localization sequence,” “nuclear localization signal,” or “NLS” refers to an amino acid sequence that promotes import of a protein into the cell nucleus. Nuclear localization sequences are known in the art and described, for example, in Plank et al., International PCT application, PCT/EP2000/011690, filed Nov. 23, 2000, published as WO/2001/038547 on May 31, 2001, the contents of which are incorporated herein by reference for their disclosure of exemplary nuclear localization sequences. In other embodiments, the NLS is an optimized NLS described, for example, by Koblan et al., Nature Biotech. 2018 doi:10.1038/nbt.4172. In some embodiments, an NLS comprises an amino acid sequence selected from: KRTADGSE FE S PKKKRKV, KRPAATKKAGQAKKKK, KKTELQTTNAENKTKKL, KRGINDRNFWRGENGRKTR, RKSGKIAAIVVKRPRK, PKKKRKV, or MDSLLMNRRKFLYQFKNVRWAKGRRETYLC.

[0134] The terms “nucleic acid” and “nucleic acid molecule,” as used herein, refer to a compound comprising a nucleobase and an acidic moiety, e.g., a nucleoside, a nucleotide, or a polymer of nucleotides. Typically, polymeric nucleic acids, e.g., nucleic acid molecules comprising three or more nucleotides are linear molecules, in which adjacent nucleotides are linked to each other via a phosphodiester linkage. In some embodiments, “nucleic acid” refers to individual nucleic acid residues (e.g. nucleotides and/or nucleosides). In some embodiments, “nucleic acid” refers to an oligonucleotide chain comprising three or more individual nucleotide residues. As used herein, the terms “oligonucleotide” and “polynucleotide” can be used interchangeably to refer to a polymer of nucleotides (e.g., a string of at least three nucleotides). In some embodiments, “nucleic acid” encompasses RNA as well as single and/or double-stranded DNA. Nucleic acids may be naturally occurring, for example, in the context of a genome, a transcript, an mRNA, tRNA, rRNA, siRNA, snRNA, a plasmid, cosmid, chromosome, chromatid, or other naturally occurring nucleic acid molecule. On the other hand, a nucleic acid molecule may be a non-naturally occurring molecule, e.g., a recombinant DNA or RNA, an artificial chromosome, an engineered genome, or fragment thereof, or a synthetic DNA, RNA, DNA/RNA hybrid, or including non-naturally occurring nucleotides or nucleosides. Furthermore, the terms “nucleic acid,” “DNA,” “RNA,” and/or similar terms include nucleic acid analogs, e.g., analogs having other than a phosphodiester backbone. Nucleic acids can be purified from natural sources, produced using recombinant expression systems and optionally purified, chemically synthesized, etc. Where appropriate, e.g., in the case of chemically synthesized molecules, nucleic acids can comprise nucleoside analogs such as analogs having chemically modified bases or sugars, and backbone modifications. A nucleic acid sequence is presented in the 5′ to 3′ direction unless otherwise indicated. In some embodiments, a nucleic acid is or comprises natural nucleosides (e.g. adenosine, thymidine, guanosine, cytidine, uridine, deoxyadenosine, deoxythymidine, deoxyguanosine, and deoxycytidine); nucleoside analogs (e.g., 2-aminoadenosine, 2-thiothymidine, inosine, pyrrolo-pyrimidine, 3-methyl adenosine, 5-methylcytidine, 2-aminoadenosine, C5-bromouridine, C5-fluorouridine, C5-iodouridine, C5-propynyl-uridine, C5-propynyl-cytidine, C5-methylcytidine, 2-aminoadenosine, 7-deazaadenosine, 7-deazaguanosine, 8-oxoadenosine, 8-oxoguanosine, 0(6)-methylguanine, and 2-thiocytidine); chemically modified bases; biologically modified bases (e.g., methylated bases); intercalated bases; modified sugars (2′-e.g.,fluororibose, ribose, 2′-deoxyribose, arabinose, and hexose); and/or modified phosphate groups (e.g., phosphorothioates and 5′-N-phosphoramidite linkages).

[0135] The term “nucleic acid programmable DNA binding protein” or “napDNAbp” may be used interchangeably with “polynucleotide programmable nucleotide binding domain” to refer to a protein that associates with a nucleic acid (e.g., DNA or RNA), such as a guide nucleic acid or guide polynucleotide (e.g., gRNA), that guides the napDNAbp to a specific nucleic acid sequence. In some embodiments, the polynucleotide programmable nucleotide binding domain is a polynucleotide programmable DNA binding domain. In some embodiments, the polynucleotide programmable nucleotide binding domain is a polynucleotide programmable RNA binding domain. In some embodiments, the polynucleotide programmable nucleotide binding domain is a Cas9 protein. A Cas9 protein can associate with a guide RNA that guides the Cas9 protein to a specific DNA sequence that is complementary to the guide RNA. In some embodiments, the napDNAbp is a Cas9 domain, for example a nuclease active Cas9, a Cas9 nickase (nCas9), or a nuclease inactive Cas9 (dCas9). Non-limiting examples of nucleic acid programmable DNA binding proteins include, Cas9 (e.g., dCas9 and nCas9), Cas12a/Cpf1, Cas12b/C2c1, Cas12c/C2c3, Cas12d/CasY, Cas12e/CasX, Cas12g, Cas12h, and Cas12i. Non-limiting examples of Cas enzymes include Cas1, Cas1B, Cas2, Cas3, Cas4, Cas5, Cas5d, Cas5t, Cas5h, Cas5a, Cas6, Cas7, Cas8, Cas8a, Cas8b, Cas8c, Cas9 (also known as Csn1 or Csx12), Cas10, Cas10d, Cas12a/Cpf1, Cas12b/C2c1, Cas12c/C2c3, Cas12d/CasY, Cas12e/CasX, Cas12g, Cas12h, Cas12i, Csy1 , Csy2, Csy3, Csy4, Cse1, Cse2, Cse3, Cse4, Cse5e, Csc1, Csc2, Csa5, Csn1, Csn2, Csm1, Csm2, Csm3, Csm4, Csm5, Csm6, Cmr1, Cmr3, Cmr4, Cmr5, Cmr6, Csb1, Csb2, Csb3, Csx17, Csx14, Csx10, Csx16, CsaX, Csx3, Csx1, Csx1S, Csx11, Csf1, Csf2, CsO, Csf4, Csd1, Csd2, Cst1, Cst2, Csh1, Csh2, Csa1, Csa2, Csa3, Csa4, Csa5, Type II Cas effector proteins, Type V Cas effector proteins, Type VI Cas effector proteins, CARF, DinG, homologues thereof, or modified or engineered versions thereof. Other nucleic acid programmable DNA binding proteins are also within the scope of this disclosure, although they may not be specifically listed in this disclosure. See, e.g., Makarova et al. “Classification and Nomenclature of CRISPR-Cas Systems: Where from Here?” CRISPR J. 2018 October; 1:325-336. doi: 10.1089/crispr.2018.0033; Yan et al., “Functionally diverse type V CRISPR-Cas systems” Science. 2019 Jan. 4; 363(6422):88-91. doi: 10.1126/science.aav7271, the entire contents of each are hereby incorporated by reference.

[0136] The term “nucleobase,” “nitrogenous base,” or “base,” used interchangeably herein, refers to a nitrogen-containing biological compound that forms a nucleoside, which in turn is a component of a nucleotide. The ability of nucleobases to form base pairs and to stack one upon another leads directly to long-chain helical structures such as ribonucleic acid (RNA) and deoxyribonucleic acid (DNA). Five nucleobases—adenine (A), cytosine (C), guanine (G), thymine (T), and uracil (U)—are called primary or canonical. Adenine and guanine are derived from purine, and cytosine, uracil, and thymine are derived from pyrimidine. DNA and RNA can also contain other (non-primary) bases that are modified. Non-limiting exemplary modified nucleobases can include hypoxanthine, xanthine, 7-methylguanine, 5,6-dihydrouracil, 5-methylcytosine (m5C), and 5-hydromethylcytosine. Hypoxanthine and xanthine can be created through mutagen presence, both of them through deamination (replacement of the amine group with a carbonyl group). Hypoxanthine can be modified from adenine. Xanthine can be modified from guanine. Uracil can result from deamination of cytosine. A “nucleoside” consists of a nucleobase and a five carbon sugar (either ribose or deoxyribose). Examples of a nucleoside include adenosine, guanosine, uridine, cytidine, 5-methyluridine (m5U), deoxyadenosine, deoxyguanosine, thymidine, deoxyuridine, and deoxycytidine. Examples of a nucleoside with a modified nucleobase includes inosine (I), xanthosine (X), 7-methylguanosine (m7G), dihydrouridine (D), 5-methylcytidine (m5C), and pseudouridine (ψ). A “nucleotide” consists of a nucleobase, a five carbon sugar (either ribose or deoxyribose), and at least one phosphate group.

[0137] The terms “nucleobase editing domain” or “nucleobase editing protein,” as used herein, refers to a protein or enzyme that can catalyze a nucleobase modification in RNA or DNA, such as cytosine (or cytidine) to uracil (or uridine) or thymine (or thymidine), and adenine (or adenosine) to hypoxanthine (or inosine) deaminations, as well as non-templated nucleotide additions and insertions. In some embodiments, the nucleobase editing domain is a deaminase domain (e.g., an adenine deaminase or an adenosine deaminase). In some embodiments, the nucleobase editing domain can be a naturally occurring nucleobase editing domain. In some embodiments, the nucleobase editing domain can be an engineered or evolved nucleobase editing domain from the naturally occurring nucleobase editing domain. The nucleobase editing domain can be from any organism, such as a bacterium, human, chimpanzee, gorilla, monkey, cow, dog, rat, or mouse.

[0138] As used herein, “obtaining” as in “obtaining an agent” includes synthesizing, purchasing, or otherwise acquiring the agent.

[0139] A “patient” or “subject” as used herein refers to a mammalian subject or individual diagnosed with, at risk of having or developing, or suspected of having or developing a disease or a disorder. In some embodiments, the term “patient” refers to a mammalian subject with a higher than average likelihood of developing a disease or a disorder.

[0140] Exemplary patients can be humans, non-human primates, cats, dogs, pigs, cattle, cats, horses, camels, llamas, goats, sheep, rodents (e.g., mice, rabbits, rats, or guinea pigs) and other mammalians that can benefit from the therapies disclosed herein. Exemplary human patients can be male and/or female.

[0141] “Patient in need thereof” or “subject in need thereof” is referred to herein as a patient diagnosed with or suspected of having a disease or disorder, for instance, but not restricted to Glycogen Storage Disease Type 1 (GSD1 or Von Gierke Disease).

[0142] The terms “pathogenic mutation,” “pathogenic variant,” “disease casing mutation,” “disease causing variant,” “deleterious mutation,” or “predisposing mutation” refers to a genetic alteration or mutation that increases an individual's susceptibility or predisposition to a certain disease or disorder. In some embodiments, the pathogenic mutation comprises at least one wild-type amino acid substituted by at least one pathogenic amino acid in a protein encoded by a gene.

[0143] The terms “protein,” “peptide,” “polypeptide,” and their grammatical equivalents are used interchangeably herein, and refer to a polymer of amino acid residues linked together by peptide (amide) bonds. The terms refer to a protein, peptide, or polypeptide of any size, structure, or function. Typically, a protein, peptide, or polypeptide will be at least three amino acids long. A protein, peptide, or polypeptide can refer to an individual protein or a collection of proteins. One or more of the amino acids in a protein, peptide, or polypeptide can be modified, for example, by the addition of a chemical entity such as a carbohydrate group, a hydroxyl group, a phosphate group, a farnesyl group, an isofarnesyl group, a fatty acid group, a linker for conjugation, functionalization, or other modifications, etc. A protein, peptide, or polypeptide can also be a single molecule or can be a multi-molecular complex. A protein, peptide, or polypeptide can be just a fragment of a naturally occurring protein or peptide. A protein, peptide, or polypeptide can be naturally occurring, recombinant, or synthetic, or any combination thereof. The term “fusion protein” as used herein refers to a hybrid polypeptide which comprises protein domains from at least two different proteins. One protein can be located at the amino-terminal (N-terminal) portion of the fusion protein or at the carboxy-terminal (C-terminal) protein thus forming an amino-terminal fusion protein or a carboxy-terminal fusion protein, respectively. A protein can comprise different domains, for example, a nucleic acid binding domain (e.g., the gRNA binding domain of Cas9 that directs the binding of the protein to a target site) and a nucleic acid cleavage domain, or a catalytic domain of a nucleic acid editing protein. In some embodiments, a protein comprises a proteinaceous part, e.g., an amino acid sequence constituting a nucleic acid binding domain, and an organic compound, e.g., a compound that can act as a nucleic acid cleavage agent. In some embodiments, a protein is in a complex with, or is in association with, a nucleic acid, e.g., RNA or DNA. Any of the proteins provided herein can be produced by any method known in the art. For example, the proteins provided herein can be produced via recombinant protein expression and purification, which is especially suited for fusion proteins comprising a peptide linker. Methods for recombinant protein expression and purification are well known, and include those described by Green and Sambrook, Molecular Cloning: A Laboratory Manual (4th ed., Cold Spring Harbor Laboratory Press, Cold Spring Harbor, N.Y. (2012)), the entire contents of which are incorporated herein by reference.

[0144] Polypeptides and proteins disclosed herein (including functional portions and functional variants thereof) can comprise synthetic amino acids in place of one or more naturally-occurring amino acids. Such synthetic amino acids are known in the art, and include, for example, aminocyclohexane carboxylic acid, norleucine, α-amino n-decanoic acid, homoserine, S-acetyl aminomethyl-cysteine, trans-3- and trans-4-hydroxyproline, 4-aminophenyl alanine, 4-nitrophenylalanine, 4-chlorophenylalanine, 4-carboxyphenylalanine, β-phenylserine β-hydroxyphenylalanine, phenylglycine, α-naphthylalanine, cyclohexylalanine, cyclohexylglycine, indoline-2-carboxylic acid, 1,2,3,4-tetrahydroisoquinoline-3-carboxylic acid, aminomalonic acid, aminomalonic acid monoamide, N′-benzyl-N′-methyl-lysine, N′,N′-dibenzyl-lysine, 6-hydroxylysine, ornithine, α-aminocyclopentane carboxylic acid, α-aminocyclohexane carboxylic acid, α-aminocycloheptane carboxylic acid, α-(2-amino-2-norbornane)-carboxylic acid, α,γ-diaminobutyric acid, α,β-diaminopropionic acid, homophenylalanine, and α-tert-butylglycine. The polypeptides and proteins can be associated with post-translational modifications of one or more amino acids of the polypeptide constructs. Non-limiting examples of post-translational modifications include phosphorylation, acylation including acetylation and formylation, glycosylation (including N-linked and O-linked), amidation, hydroxylation, alkylation including methylation and ethylation, ubiquitylation, addition of pyrrolidone carboxylic acid, formation of disulfide bridges, sulfation, myristoylation, palmitoylation, isoprenylation, farnesylation, geranylation, glypiation, lipoylation and iodination.

[0145] The term “recombinant” as used herein in the context of proteins or nucleic acids refers to proteins or nucleic acids that do not occur in nature, but are the product of human engineering. For example, in some embodiments, a recombinant protein or nucleic acid molecule comprises an amino acid or nucleotide sequence that comprises at least one, at least two, at least three, at least four, at least five, at least six, or at least seven mutations as compared to any naturally occurring sequence.

[0146] By “reduces” is meant a negative alteration of at least 10%, 25%, 50%, 75%, or 100%.

[0147] By “reference” is meant a standard or control condition. In one embodiment, the reference is a wild-type or healthy cell. In other embodiments and without limitation, a reference is an untreated cell that is not subjected to a test condition, or is subjected to placebo or normal saline, medium, buffer, and/or a control vector that does not harbor a polynucleotide of interest.

[0148] A “reference sequence” is a defined sequence used as a basis for sequence comparison. A reference sequence may be a subset of or the entirety of a specified sequence; for example, a segment of a full-length cDNA or gene sequence, or the complete cDNA or gene sequence. For polypeptides, the length of the reference polypeptide sequence will generally be at least about 16 amino acids, at least about 20 amino acids, at least about 25 amino acids, about 35 amino acids, about 50 amino acids, or about 100 amino acids. For nucleic acids, the length of the reference nucleic acid sequence will generally be at least about 50 nucleotides, at least about 60 nucleotides, at least about 75 nucleotides, about 100 nucleotides or about 300 nucleotides or any integer thereabout or therebetween. In some embodiments, a reference sequence is a wild-type sequence of a protein of interest. In other embodiments, a reference sequence is a polynucleotide sequence encoding a wild-type protein.

[0149] The term “RNA-programmable nuclease,” and “RNA-guided nuclease” are used with (e.g., binds or associates with) one or more RNA(s) that is not a target for cleavage. In some embodiments, an RNA-programmable nuclease, when in a complex with an RNA, may be referred to as a nuclease:RNA complex. Typically, the bound RNA(s) is referred to as a guide RNA (gRNA). gRNAs can exist as a complex of two or more RNAs, or as a single RNA molecule. gRNAs that exist as a single RNA molecule may be referred to as single-guide RNAs (sgRNAs), though “gRNA” is used interchangeably to refer to guide RNAs that exist as either single molecules or as a complex of two or more molecules. Typically, gRNAs that exist as single RNA species comprise two domains: (1) a domain that shares homology to a target nucleic acid (e.g., and directs binding of a Cas9 complex to the target); and (2) a domain that binds a Cas9 protein. In some embodiments, domain (2) corresponds to a sequence known as a tracrRNA, and comprises a stem-loop structure. For example, in some embodiments, domain (2) is identical or homologous to a tracrRNA as provided in Jinek et ah, Science 337:816-821(2012), the entire contents of which is incorporated herein by reference. Other examples of gRNAs (e.g., those including domain 2) can be found in U.S. Provisional Patent Application, U.S. Ser. No. 61/874,682, filed September 6, 2013, entitled “Switchable Cas9 Nucleases and Uses Thereof,” and U.S. Provisional Patent Application, U.S. Ser. No. 61/874,746, filed Sep. 6, 2013, entitled “Delivery System For Functional Nucleases,” the entire contents of each are hereby incorporated by reference in their entirety. In some embodiments, a gRNA comprises two or more of domains (1) and (2), and may be referred to as an “extended gRNA.” For example, an extended gRNA will, e.g., bind two or more Cas9 proteins and bind a target nucleic acid at two or more distinct regions, as described herein. The gRNA comprises a nucleotide sequence that complements a target site, which mediates binding of the nuclease/RNA complex to said target site, providing the sequence specificity of the nuclease:RNA complex.

[0150] In some embodiments, the RNA-programmable nuclease is the (CRISPR-associated system) Cas9 endonuclease, for example, Cas9 (Casn1) from Streptococcus pyogenes (see, e.g., “Complete genome sequence of an M1 strain of Streptococcus pyogenes.” Ferretti J. J., McShan W. M., Ajdic D. J., Savic D. J., Savic G., Lyon K., Primeaux C, Sezate S., Suvorov A. N., Kenton S., Lai H. S., Lin S. P., Qian Y., Jia H. G., Najar F. Z., Ren Q., Zhu H., Song L., White J., Yuan X., Clifton S. W., Roe B. A., McLaughlin R. E., Proc. Natl. Acad. Sci. U.S.A. 98:4658-4663(2001); “CRISPR RNA maturation by trans-encoded small RNA and host factor RNase III.” Deltcheva E., Chylinski K., Sharma C M., Gonzales K., Chao Y., Pirzada Z. A., Eckert M. R., Vogel J., Charpentier E., Nature 471:602-607(2011).

[0151] Because RNA-programmable nucleases (e.g., Cas9) use RNA:DNA hybridization to target DNA cleavage sites, these proteins are able to be targeted, in principle, to any sequence specified by the guide RNA. Methods of using RNA-programmable nucleases, such as Cas9, for site-specific cleavage (e.g., to modify a genome) are known in the art (see e.g., Cong, L. et al., Multiplex genome engineering using CRISPR/Cas systems. Science 339, 819-823 (2013); Mali, P. et ah, RNA-guided human genome engineering via Cas9. Science 339, 823-826 (2013); Hwang, W. Y. et al., Efficient genome editing in zebrafish using a CRISPR-Cas system. Nature biotechnology 31, 227-229 (2013); Jinek, M. et ah, RNA-programmed genome editing in human cells. eLife 2, e00471 (2013); Dicarlo, J. E. et al., Genome engineering in Saccharomyces cerevisiae using CRISPR-Cas systems. Nucleic acids research (2013); Jiang, W. et ah RNA-guided editing of bacterial genomes using CRISPR-Cas systems. Nature biotechnology 31, 233-239 (2013); the entire contents of each of which are incorporated herein by reference).

[0152] The term “single nucleotide polymorphism (SNP)” is a variation in a single nucleotide that occurs at a specific position in the genome, where each variation is present to some appreciable degree within a population (e.g., >1%). For example, at a specific base position in the human genome, the C nucleotide can appear in most individuals, but in a minority of individuals, the position is occupied by an A. This means that there is a SNP at this specific position, and the two possible nucleotide variations, C or A, are said to be alleles for this position. SNPs underlie differences in susceptibility to disease. The severity of illness and the way our body responds to treatments are also manifestations of genetic variations. SNPs can fall within coding regions of genes, non-coding regions of genes, or in the intergenic regions (regions between genes). In some embodiments, SNPs within a coding sequence do not necessarily change the amino acid sequence of the protein that is produced, due to degeneracy of the genetic code. SNPs in the coding region are of two types: synonymous and nonsynonymous SNPs. Synonymous SNPs do not affect the protein sequence, while nonsynonymous SNPs change the amino acid sequence of protein. The nonsynonymous SNPs are of two types: missense and nonsense. SNPs that are not in protein-coding regions can still affect gene splicing, transcription factor binding, messenger RNA degradation, or the sequence of noncoding RNA. Gene expression affected by this type of SNP is referred to as an eSNP (expression SNP) and can be upstream or downstream from the gene. A single nucleotide variant (SNV) is a variation in a single nucleotide without any limitations of frequency and can arise in somatic cells. A somatic single nucleotide variation can also be called a single-nucleotide alteration.

[0153] By “specifically binds” is meant a nucleic acid molecule, polypeptide, or complex thereof (e.g., a nucleic acid programmable DNA binding domain and guide nucleic acid), compound, or molecule that recognizes and binds a polypeptide and/or nucleic acid molecule of the invention, but which does not substantially recognize and bind other molecules in a sample, for example, a biological sample.

[0154] Nucleic acid molecules useful in the methods of the invention include any nucleic acid molecule that encodes a polypeptide of the invention or a fragment thereof. Such nucleic acid molecules need not be 100% identical with an endogenous nucleic acid sequence, but will typically exhibit substantial identity. Polynucleotides having “substantial identity” to an endogenous sequence are typically capable of hybridizing with at least one strand of a double-stranded nucleic acid molecule. Nucleic acid molecules useful in the methods of the invention include any nucleic acid molecule that encodes a polypeptide of the invention or a fragment thereof. Such nucleic acid molecules need not be 100% identical with an endogenous nucleic acid sequence, but will typically exhibit substantial identity. Polynucleotides having “substantial identity” to an endogenous sequence are typically capable of hybridizing with at least one strand of a double-stranded nucleic acid molecule. By “hybridize” is meant pair to form a double-stranded molecule between complementary polynucleotide sequences (e.g., a gene described herein), or portions thereof, under various conditions of stringency. (See, e.g., Wahl, G. M. and S. L. Berger (1987) Methods Enzymol. 152:399; Kimmel, A. R. (1987) Methods Enzymol. 152:507).

[0155] For example, stringent salt concentration will ordinarily be less than about 750 mM NaCl and 75 mM trisodium citrate, preferably less than about 500 mM NaCl and 50 mM trisodium citrate, and more preferably less than about 250 mM NaCl and 25 mM trisodium citrate. Low stringency hybridization can be obtained in the absence of organic solvent, e.g., formamide, while high stringency hybridization can be obtained in the presence of at least about 35% formamide, and more preferably at least about 50% formamide. Stringent temperature conditions will ordinarily include temperatures of at least about 30° C., more preferably of at least about 37° C., and most preferably of at least about 42° C. Varying additional parameters, such as hybridization time, the concentration of detergent, e.g., sodium dodecyl sulfate (SDS), and the inclusion or exclusion of carrier DNA, are well known to those skilled in the art. Various levels of stringency are accomplished by combining these various conditions as needed. In a one: embodiment, hybridization will occur at 30° C. in 750 mM NaCl , 75 mM trisodium citrate, and 1% SDS. In another embodiment, hybridization will occur at 37° C. in 500 mM NaCl , 50 mM trisodium citrate, 1% SDS, 35% formamide, and 100 μg/ml denatured salmon sperm DNA (ssDNA). In another embodiment, hybridization will occur at 42° C. in 250 mM NaCl , 25 mM trisodium citrate, 1% SDS, 50% formamide, and 200m/ml ssDNA. Useful variations on these conditions will be readily apparent to those skilled in the art.

[0156] For most applications, washing steps that follow hybridization will also vary in stringency. Wash stringency conditions can be defined by salt concentration and by temperature. As above, wash stringency can be increased by decreasing salt concentration or by increasing temperature. For example, stringent salt concentration for the wash steps will preferably be less than about 30 mM NaCl and 3 mM trisodium citrate, and most preferably less than about 15 mM NaCl and 1.5 mM trisodium citrate. Stringent temperature conditions for the wash steps will ordinarily include a temperature of at least about 25° C., more preferably of at least about 42° C., and even more preferably of at least about 68° C. In an embodiment, wash steps will occur at 25° C. in 30 mM NaCl, 3 mM trisodium citrate, and 0.1% SDS. In a more preferred embodiment, wash steps will occur at 42 C in 15 mM NaCl, 1.5 mM trisodium citrate, and 0.1% SDS. In a more preferred embodiment, wash steps will occur at 68° C. in 15 mM NaCl, 1.5 mM trisodium citrate, and 0.1% SDS. Additional variations on these conditions will be readily apparent to those skilled in the art. Hybridization techniques are well known to those skilled in the art and are described, for example, in Benton and Davis (Science 196:180, 1977); Grunstein and Hogness (Proc. Natl. Acad. Sci., USA 72:3961, 1975); Ausubel et al. (Current Protocols in Molecular Biology, Wiley Interscience, New York, 2001); Berger and Kimmel (Guide to Molecular Cloning Techniques, 1987, Academic Press, New York); and Sambrook et al., Molecular Cloning: A Laboratory Manual, Cold Spring Harbor Laboratory Press, New York.

[0157] By “split” is meant divided into two or more fragments.

[0158] A “split Cas9 protein” or “split Cas9” refers to a Cas9 protein that is provided as an N-terminal fragment and a C-terminal fragment encoded by two separate nucleotide sequences. The polypeptides corresponding to the N-terminal portion and the C-terminal portion of the Cas9 protein may be spliced to form a “reconstituted” Cas9 protein. In particular embodiments, the Cas9 protein is divided into two fragments within a disordered region of the protein, e.g., as described in Nishimasu et al., Cell, Volume 156, Issue 5, pp. 935-949, 2014, or as described in Jiang et al. (2016) Science 351: 867-871. PDB file: 5F9R, each of which is incorporated herein by reference. In some embodiments, the protein is divided into two fragments at any C, T, A, or S within a region of SpCas9 between about amino acids A292-G364, F445-K483, or E565-T637, or at corresponding positions in any other Cas9, Cas9 variant (e.g., nCas9, dCas9), or other napDNAbp. In some embodiments, protein is divided into two fragments at SpCas9 T310, T313, A456, 5469, or C574. In some embodiments, the process of dividing the protein into two fragments is referred to as “splitting” the protein.

[0159] In other embodiments, the N-terminal portion of the Cas9 protein comprises amino acids 1-573 or 1-637 S. pyogenes Cas9 wild-type (SpCas9) (NCBI Reference Sequence: NC_002737.2, Uniprot Reference Sequence: Q99ZW2) and the C-terminal portion of the Cas9 protein comprises a portion of amino acids 574-1368 or 638-1368 of SpCas9 wild-type, or a corresponding position thereof.

[0160] The C-terminal portion of the split Cas9 can be joined with the N-terminal portion of the split Cas9 to form a complete Cas9 protein. In some embodiments, the C-terminal portion of the Cas9 protein starts from where the N-terminal portion of the Cas9 protein ends. As such, in some embodiments, the C-terminal portion of the split Cas9 comprises a portion of amino acids (551-651)-1368 of spCas9. “(551-651)-1368” means starting at an amino acid between amino acids 551-651 (inclusive) and ending at amino acid 1368. For example, the C-terminal portion of the split Cas9 may comprise a portion of any one of amino acid 551-1368, 552-1368, 553-1368, 554-1368, 555-1368, 556-1368, 557-1368, 558-1368, 559-1368, 560-1368, 561-1368, 562-1368, 563-1368, 564-1368, 565-1368, 566-1368, 567-1368, 568-1368, 569-1368, 570-1368, 571-1368, 572-1368, 573-1368, 574-1368, 575-1368, 576-1368, 577-1368, 578-1368, 579-1368, 580-1368, 581-1368, 582-1368, 583-1368, 584-1368, 585-1368, 586-1368, 587-1368, 588-1368, 589-1368, 590-1368, 591-1368, 592-1368, 593-1368, 594-1368, 595-1368, 596-1368, 597-1368, 598-1368, 599-1368, 600-1368, 601-1368, 602-1368, 603-1368, 604-1368, 605-1368, 606-1368, 607-1368, 608-1368, 609-1368, 610-1368, 611-1368, 612-1368, 613-1368, 614-1368, 615-1368, 616-1368, 617-1368, 618-1368, 619-1368, 620-1368, 621-1368, 622-1368, 623-1368, 624-1368, 625-1368, 626-1368, 627-1368, 628-1368, 629-1368, 630-1368, 631-1368, 632-1368, 633-1368, 634-1368, 635-1368, 636-1368, 637-1368, 638-1368, 639-1368, 640-1368, 641-1368, 642-1368, 643-1368, 644-1368, 645-1368, 646-1368, 647-1368, 648-1368, 649-1368, 650-1368, or 651-1368 of spCas9. In some embodiments, the C-terminal portion of the split Cas9 protein comprises a portion of amino acids 574-1368 or 638-1368 of SpCas9.

[0161] By “subject” is meant a mammal, including, but not limited to, a human or non-human mammal, such as a bovine, equine, canine, ovine, or feline. Subjects include livestock, domesticated animals raised to produce labor and to provide commodities, such as food, including without limitation, cattle, goats, chickens, horses, pigs, rabbits, and sheep.

[0162] By “substantially identical” is meant a polypeptide or nucleic acid molecule exhibiting at least 50% identity to a reference amino acid sequence (for example, any one of the amino acid sequences described herein) or nucleic acid sequence (for example, any one of the nucleic acid sequences described herein). In one embodiment, such a sequence is at least 60%, 80% or 85%, 90%, 95% or even 99% identical at the amino acid level or nucleic acid to the sequence used for comparison.

[0163] Sequence identity is typically measured using sequence analysis software (for example, Sequence Analysis Software Package of the Genetics Computer Group, University of Wisconsin Biotechnology Center, 1710 University Avenue, Madison, Wis. 53705, BLAST, BESTFIT, COBALT, EMBOSS Needle, GAP, or PILEUP/PRETTYBOX programs). Such software matches identical or similar sequences by assigning degrees of homology to various substitutions, deletions, and/or other modifications. Conservative substitutions typically include substitutions within the following groups: glycine, alanine;

[0164] valine, isoleucine, leucine; aspartic acid, glutamic acid, asparagine, glutamine; serine, threonine; lysine, arginine; and phenylalanine, tyrosine. In an exemplary approach to determining the degree of identity, a BLAST program may be used, with a probability score between e⁻³ and e⁻¹⁰⁰ indicating a closely related sequence. COBALT is used, for example, with the following parameters:
[0165] a) alignment parameters: Gap penalties-11,-1 and End-Gap penalties-5,-1,
[0166] b) CDD Parameters: Use RPS BLAST on; Blast E-value 0.003; Find Conserved columns and Recompute on, and
[0167] c) Query Clustering Parameters: Use query clusters on; Word Size 4; Max cluster distance 0.8; Alphabet Regular.
   EMBOSS Needle is used, for example, with the following parameters:
[0168] a) Matrix: BLOSUM62;
[0169] b) GAP OPEN: 10;
[0170] c) GAP EXTEND: 0.5;
[0171] d) OUTPUT FORMAT: pair;
[0172] e) END GAP PENALTY: false;
[0173] f) END GAP OPEN: 10; and
[0174] g) END GAP EXTEND: 0.5.

[0175] The term “target site” refers to a sequence within a nucleic acid molecule that is modified by a nucleobase editor. In one embodiment, the target site is deaminated by a deaminase or a fusion protein comprising a deaminase (e.g., adenine deaminase).

[0176] As used herein, the terms “treat,” treating,” “treatment,” and the like refer to reducing or ameliorating a disorder and/or symptom associated therewith or obtaining a desired pharmacologic and/or physiologic effect. It will be appreciated that, although not precluded, treating a disorder or condition does not require that the disorder, condition or symptoms associated therewith be completely eliminated. In some embodiments, the effect is therapeutic, i.e., without limitation, the effect partially or completely reduces, diminishes, abrogates, abates, alleviates, decreases the intensity of, or cures a disease and/or adverse symptom attributable to the disease. In some embodiments, the effect is preventative, i.e., the effect protects or prevents an occurrence or reoccurrence of a disease or condition. To this end, the presently disclosed methods comprise administering a therapeutically effective amount of a compositions as described herein.

[0177] By “uracil glycosylase inhibitor” or “UGI” is meant an agent that inhibits the uracil-excision repair system. In one embodiment, the agent is a protein or fragment thereof that binds a host uracil-DNA glycosylase and prevents removal of uracil residues from DNA. In an embodiment, a UGI is a protein, a fragment thereof, or a domain that is capable of inhibiting a uracil-DNA glycosylase base-excision repair enzyme. In some embodiments, a UGI domain comprises a wild-type UGI or a modified version thereof. In some embodiments, a UGI domain comprises a fragment of the exemplary amino acid sequence set forth below. In some embodiments, a UGI fragment comprises an amino acid sequence that comprises at least 60%, at least 65%, at least 70%, at least 75%, at least 80%, at least 85%, at least 90%, at least 95%, at least 96%, at least 97%, at least 98%, at least 99%, or 100% of the exemplary UGI sequence provided below. In some embodiments, a UGI comprises an amino acid sequence that is homologous to the exemplary UGI amino acid sequence or fragment thereof, as set forth below. In some embodiments, the UGI, or a portion thereof, is at least 70%, at least 75%, at least 80%, at least 85%, at least 90%, at least 95%, at least 96%, at least 97%, at least 98%, at least 99%, at least 99.5%, at least 99.9%, or 100% identical to a wild-type UGI or a UGI sequence, or portion thereof, as set forth below. An exemplary UGI comprises an amino acid sequence as follows:

>sp|P14739|UNGI_BPPB2 Uracil-DNA glycosylase
inhibitor
MTNLSDIIEKETGKQLVIQESILMLPEEVEEVIGNKPESDILVHTAYDE
STDENVMLLTSDAPEYKPWALVIQDSNGENKIKML.

[0178] The term “vector” refers to a means of introducing a nucleic acid sequence into a cell, resulting in a transformed cell. Vectors include plasmids, transposons, phages, viruses, liposomes, and episome. “Expression vectors” are nucleic acid sequences comprising the nucleotide sequence to be expressed in the recipient cell. Expression vectors may include additional nucleic acid sequences to promote and/or facilitate the expression of the of the introduced sequence such as start, stop, enhancer, promoter, and secretion sequences.

[0179] Any compositions or methods provided herein can be combined with one or more of any of the other compositions and methods provided herein.

[0180] DNA editing has emerged as a viable means to modify disease states by correcting pathogenic mutations at the genetic level. Until recently, all DNA editing platforms have functioned by inducing a DNA double strand break (DSB) at a specified genomic site and relying on endogenous DNA repair pathways to determine the product outcome in a semi-stochastic manner, resulting in complex populations of genetic products. Though precise, user-defined repair outcomes can be achieved through the homology directed repair (HDR) pathway, a number of challenges have prevented high efficiency repair using HDR in therapeutically-relevant cell types. In practice, this pathway is inefficient relative to the competing, error-prone non-homologous end joining pathway. Further, HDR is tightly restricted to the G1 and S phases of the cell cycle, preventing precise repair of DSBs in post-mitotic cells. As a result, it has proven difficult or impossible to alter genomic sequences in a user-defined, programmable manner with high efficiencies in these populations.

### BRIEF DESCRIPTION OF THE DRAWINGS

[0181] The features of the present disclosure are set forth with particularity in the appended claims. A better understanding of the features and advantages of the present will be obtained by reference to the following detailed description that sets forth illustrative embodiments, in which the principles of the disclosure are utilized, and the accompanying drawings of which:

[0182] FIG. 1 depicts a G6PC nucleotide target sequence and corresponding amino acid sequence indicating bystander and on target A>G bases for correction of the GSD1a Q347X mutation.

[0183] FIG. 2 depicts precise base correction and bystander editing. FIG. 2A depicts positions of a target nucleobase and a bystander nucleobase. FIG. 2B depicts the percentage of precise on target and bystander correction of the GSD1a G6PC Q347X mutation in HEK293T cells using ABE8 variants.

[0184] FIGS. 3A and 3B depict editor optimization for correction of the GSD1a G6PC Q347X mutation in HEK293T cells. FIG. 3A depicts a G6PC nucleotide target sequence and corresponding amino acid sequence indicating bystander and on target A>G bases and the GGA PAM sequence for correction of the GSD1a Q347X mutation. FIG. 3B is a graph depicting the percentage of correction of the GSD1a G6PC Q347X mutation using ABE8 monomer and heterodimer variants.

[0185] FIG. 4 is a graph depicting the percentage of correction of the GSD1a G6PC Q347X mutation using ABE8 double mutant variants in HEK293T cells comparing bystander (A2) and on target (A6) A>G bases.

[0186] FIG. 5 is a graph depicting the percentage of precise correction of the GSD1a Q347X mutation using ABE8 variants in patient derived B-lymphocytes.

[0187] FIGS. 6A and 6B depict precise correction of GSD1a G6PC Q347X mutation in compound heterozygous (Q347X, G222R) patient iPS-derived hepatocytes. FIG. 6A depicts a G6PC nucleotide target sequence, corresponding amino acid sequence, and the GGA PAM sequence indicating bystander and on target A>G bases for correction of the GSD1a Q347X mutation. FIG. 6B is a graph depicting the A>G base editing efficiency of the GSD1a Q347X mutation using an ABE8 variant comparing on-target to bystander correction.

[0188] FIGS. 7A and 7B depict editor optimization for correction of GSD1a Q347X mutation in patient iPS-derived hepatocytes. FIG. 7A shows the NGA PAM sequence and corresponding target sequence for GSD1a indicating bystander and on target A>G bases. FIG. 7B is a graph depicting the base editing efficiency of the GSD1a Q347X mutation using ABE8 variants.

[0189] FIGS. 8A and 8B provide an in vitro transduction schedule for the GSD1a Q347X mutation in a primary hepatocyte co-cultures system. FIG. 8A provides a timeline of the in vitro transduction schedule in either hepatocyte monolayers or hepatocyte co-cultures showing representative time points. FIG. 8B shows images of transduced primary hepatocytes from donors used in the co-culture system for the GSD1a Q347X mutation.

[0190] FIG. 9 shows images of GFP expression (GFP, Brightfield, Merge) on day 6 (D6) in primary hepatocyte co-cultured cells transduced with lentiviral vector containing the GSD1a Q347X mutation at a multiplicity of infection (MOI) of 30, 100, and 300 lentivirus.

[0191] FIGS. 10A, 10B, and 10C depict the correction of the GSD 1a Q347X mutation in lentiviral transduced primary hepatocyte co-cultures system. FIG. 10A shows an image of GFP expression in primary hepatocyte co-cultured cells (donor RSE) transduced with lentiviral vector containing the GSD1a Q347X mutation at a MOI of 500. FIG. 10B is a graph depicting the A>G base editing efficiency for on-target correction of the GSD1a Q347X mutation and indels in transduced primary hepatocyte co-cultures. The dashed line represents the A>G base editing efficiency for therapeutic benefit. FIG. 10C is a graph depicting the A>G base editing efficiency of the GSD1a Q347X mutation in transduced primary hepatocyte co-cultures in media with or without polyethylene glycol 8000 (PEG8K) and treated with collagenase Types III, IV, and hyaluronic acid or were kept untreated.

[0192] FIG. 11 depicts a G6PC nucleotide target sequence and corresponding amino acid sequence indicating bystander and on target A>G bases for correction of the GSD1a R83C mutation.

[0193] FIGS. 12A and 12B depict precise correction of GSD1a G6PC R83C mutation in HEK293T cells. FIG. 12A depicts a G6PC nucleotide target sequence and corresponding amino acid sequence indicating bystander, synonymous, and on target A>G bases for correction of the GSD 1a R83C mutation. FIG. 12B is a graph depicting the A>G base editing efficiency of the GSD1a R83C mutation using ABE8 variants comparing on-target to bystander correction.

[0194] FIGS. 13A and 13B depict base editing of G6PC R83C mutation by plasmid transfection in HEK293T lenti-model cells. FIG. 13A shows the GAGAAT PAM sequence and corresponding target sequence for GSD 1 a gRNA #820 and the AGA PAM sequence and corresponding target sequence for GSD1a gRNA #1121, indicating bystander and on target A >G bases of the target sequence. FIG. 13B is a graph depicting the percentage of on target and bystander correction of the GSD1a R83C mutation using ABE base editors with gRNA1121 or gRNA820.

[0195] FIG. 14 is a graph depicting the A>G base editing efficiency of the GSD1a R83C mutation using saABE8 variants.

[0196] FIG. 15 is a graph depicting the A>G base editing efficiency of the GSD1a R83C mutation using saABE8 double mutant variants.

[0197] FIG. 16 is a graph depicting the A>G base editing efficiency of on target, bystander, and synonymous bystander corrections of the GSD1a R83C mutation using ABE8 variants in HEK293T cells.

[0198] FIGS. 17A and 17B depict the correction of the GSD1a Q347X mutation in primary mouse hepatocytes isolated from a transgenic mouse model for GSD1a. FIG. 17A shows an image of primary mouse hepatocytes isolated from ASC transgenic mouse model, huG6PC, R83C (V166L). FIG. 17B is a graph depicting the base editing efficiency of positions A12G, A10G, A6G, and Indels for correction of the GSD1a R83C mutation in primary mouse hepatocytes isolated from a GSD1a transgenic mouse model using ABE8 variants.

[0199] FIG. 18 is a graph depicting levels of A>G base editing at on-target (12A) and off-target (6A) sites using a TadA-SaCas9 ABE editor in combination with guide RNAs of varying lengths as shown. Data were obtained in HEK293T cells. Target site and other editing details are also provided.

[0200] FIG. 19 is a graph depicting levels of A>G base editing (Percent Editing) at on-target (12A) and off-target (6A) sites using ABE8s (TadA*8 variants-SaCas9) in combination with 20 nt and 21 nt guide RNAs. Data were obtained in HEK293T cells.

[0201] FIG. 20 is a graph depicting levels of A>G base editing (% Correction of R83C) at on-target (12A) and off-target (6A) sites using ABE base editors (TadA variants-SaCas9) in combination with 20 nt or 21 nt guide RNAs. Data were obtained in HEK293T cells.

[0202] FIG. 21 is a graph depicting levels of A>G (%) base editing at on-target (12A) and off-target (6A) sites using ABE base editors (TadA variants-SaCas9) in combination with 20 nt or 21 nt guide RNAs. Data were obtained in primary human hepatocyte lentiviral model for GSD1a R83C.

[0203] FIG. 22 is a graph depicting levels of A>G base editing (% Correction of R83C) at on-target (12A) and off-target (6A) sites using ABE base editors (TadA variants-SaCas9) in combination with 20 nt or 21 nt guide RNAs. Data were obtained in primary human hepatocyte lentiviral model for GSD1a R83C.

[0204] FIG. 23 is a graph depicting levels of A>G (%) precise base editing at on-target and off-target sites in heterozygous transgenic GSD1a R83C mice.

[0205] FIG. 24 is a table depicting Cas9 variants for accessing all possible PAMs for NRNN PAM. Only Cas9 variants that require recognition of three or fewer defined nucleotides in their PAMs are listed. The non-G PAM variants include SpCas9-NRRH, SpCas9-NRTH, and SpCas9-LARCH.

### DETAILED DESCRIPTION OF THE INVENTION

[0206] The invention provides compositions comprising novel adenosine base editors (e.g., ABE8) that have increased efficiency and methods of using base editors comprising adenosine deaminase variants for altering mutations associated with Glycogen Storage Disease Type 1a (GSD1a).

[0207] The invention is based, at least in part, on the discovery that a base editor featuring adenosine deaminase variants (i.e. ABE8) precisely corrects single nucleotide polymorphisms in the endogenous glucose-6-phosphatase (G6PC) gene (e.g. R83C, Q347X).

[0208] The GSD1a mutations, R83C and Q347X, are cytidine to thymidine (C→T) transition mutations, resulting in a C•G to T•A base pair substitution. These substitutions may be reverted back to a wild-type, non-pathogenic genomic sequence with an adenosine base editor (ABE) which catalyzes A•T to G•C substitutions. By extension, GSD1a-causing mutations are potential targets for reversion to wild-type sequence using ABEs without the risks of inducing G6PC gene overexpression, as may occur using gene therapy. Accordingly, A•T to G•C DNA base editing precisely corrects one or more of the most prevalent GSD1a-causing mutations in the G6PC gene.

### Nucleobase Editor

[0209] Disclosed herein is a base editor or a nucleobase editor for editing, modifying or altering a target nucleotide sequence of a polynucleotide. Described herein is a nucleobase editor or a base editor comprising a polynucleotide programmable nucleotide binding domain and a nucleobase editing domain (e.g., adenosine deaminase). A polynucleotide programmable nucleotide binding domain, when in conjunction with a bound guide polynucleotide (e.g., gRNA), can specifically bind to a target polynucleotide sequence (i.e., via complementary base pairing between bases of the bound guide nucleic acid and bases of the target polynucleotide sequence) and thereby localize the base editor to the target nucleic acid sequence desired to be edited. In some embodiments, the target polynucleotide sequence comprises single-stranded DNA or double-stranded DNA. In some embodiments, the target polynucleotide sequence comprises RNA. In some embodiments, the target polynucleotide sequence comprises a DNA-RNA hybrid.

### Polynucleotide Programmable Nucleotide Binding Domain

[0210] It should be appreciated that polynucleotide programmable nucleotide binding domains can also include nucleic acid programmable proteins that bind RNA. For example, the polynucleotide programmable nucleotide binding domain can be associated with a nucleic acid that guides the polynucleotide programmable nucleotide binding domain to an RNA. Other nucleic acid programmable DNA binding proteins are also within the scope of this disclosure, though they are not specifically listed in this disclosure.

[0211] A polynucleotide programmable nucleotide binding domain of a base editor can itself comprise one or more domains. For example, a polynucleotide programmable nucleotide binding domain can comprise one or more nuclease domains. In some embodiments, the nuclease domain of a polynucleotide programmable nucleotide binding domain can comprise an endonuclease or an exonuclease. Herein the term “exonuclease” refers to a protein or polypeptide capable of digesting a nucleic acid (e.g., RNA or DNA) from free ends, and the term “endonuclease” refers to a protein or polypeptide capable of catalyzing (e.g., cleaving) internal regions in a nucleic acid (e.g., DNA or RNA). In some embodiments, an endonuclease can cleave a single strand of a double-stranded nucleic acid. In some embodiments, an endonuclease can cleave both strands of a double-stranded nucleic acid molecule. In some embodiments a polynucleotide programmable nucleotide binding domain can be a deoxyribonuclease. In some embodiments a polynucleotide programmable nucleotide binding domain can be a ribonuclease.

[0212] In some embodiments, a nuclease domain of a polynucleotide programmable nucleotide binding domain can cut zero, one, or two strands of a target polynucleotide. In some embodiments, the polynucleotide programmable nucleotide binding domain can comprise a nickase domain. Herein the term “nickase” refers to a polynucleotide programmable nucleotide binding domain comprising a nuclease domain that is capable of cleaving only one strand of the two strands in a duplexed nucleic acid molecule (e.g., DNA). In some embodiments, a nickase can be derived from a fully catalytically active (e.g., natural) form of a polynucleotide programmable nucleotide binding domain by introducing one or more mutations into the active polynucleotide programmable nucleotide binding domain. For example, where a polynucleotide programmable nucleotide binding domain comprises a nickase domain derived from Cas9, the Cas9-derived nickase domain can include a D10A mutation and a histidine at position 840. In such embodiments, the residue H840 retains catalytic activity and can thereby cleave a single strand of the nucleic acid duplex. In another example, a Cas9-derived nickase domain can comprise an H840A mutation, while the amino acid residue at position 10 remains a D. In some embodiments, a nickase can be derived from a fully catalytically active (e.g., natural) form of a polynucleotide programmable nucleotide binding domain by removing all or a portion of a nuclease domain that is not required for the nickase activity. For example, where a polynucleotide programmable nucleotide binding domain comprises a nickase domain derived from Cas9, the Cas9-derived nickase domain can comprise a deletion of all or a portion of the RuvC domain or the HNH domain.

[0213] The amino acid sequence of an exemplary catalytically active Cas9 is as follows:

MDKKYSIGLDIGTNSVGWAVITDEYKVPSKKFKVLGNTDRHSIKKNLIGALLFDSGETAEAT
RLKRTARRRYTRRKNRICYLQEIFSNEMAKVDDSFFHRLEESFLVEEDKKHERHPIFGNIVD
EVAYHEKYPTIYHLRKKLVDSTDKADLRLIYLALAHMIKFRGHFLIEGDLNPDNSDVDKLFI
QLVQTYNQLFEENPINASGVDAKAILSARLSKSRRLENLIAQLPGEKKNGLFGNLIALSLGL
TPNFKSNFDLAEDAKLQLSKDTYDDDLDNLLAQIGDQYADLFLAAKNLSDAILLSDILRVNT
EITKAPLSASMIKRYDEHHQDLTLLKALVRQQLPEKYKEIFFDQSKNGYAGYIDGGASQEEF
YKFIKPILEKMDGTEELLVKLNREDLLRKQRTFDNGSIPHQIHLGELHAILRRQEDFYPFLK
DNREKIEKILTFRIPYYVGPLARGNSRFAWMTRKSEETITPWNFEEVVDKGASAQSFIERMT
NFDKNLPNEKVLPKHSLLYEYFTVYNELTKVKYVTEGMRKPAFLSGEQKKAIVDLLFKTNRK
VTVKQLKEDYFKKIECFDSVEISGVEDRFNASLGTYHDLLKIIKDKDFLDNEENEDILEDIV
LTLTLFEDREMIEERLKTYAHLFDDKVMKQLKRRRYTGWGRLSRKLINGIRDKQSGKTILDF
LKSDGFANRNFMQLIHDDSLTFKEDIQKAQVSGQGDSLHEHIANLAGSPAIKKGILQTVKVV
DELVKVMGRHKPENIVIEMARENQTTQKGQKNSRERMKRIEEGIKELGSQILKEHPVENTQL
QNEKLYLYYLQNGRDMYVDQELDINRLSDYDVDHIVPQSFLKDDSIDNKVLTRSDKNRGKSD
NVPSEEVVKKMKNYWRQLLNAKLITQRKFDNLTKAERGGLSELDKAGFIKRQLVETRQITKH
VAQILDSRMNTKYDENDKLIREVKVITLKSKLVSDFRKDFQFYKVREINNYHHAHDAYLNAV
VGTALIKKYPKLESEFVYGDYKVYDVRKMIAKSEQEIGKATAKYFFYSNIMNFFKTEITLAN
GEIRKRPLIETNGETGEIVWDKGRDFATVRKVLSMPQVNIVKKTEVQTGGFSKESILPKRNS
DKLIARKKDWDPKKYGGFDSPTVAYSVLVVAKVEKGKSKKLKSVKELLGITIMERSSFEKNP
IDFLEAKGYKEVKKDLIIKLPKYSLFELENGRKRMLASAGELQKGNELALPSKYVNFLYLAS
HYEKLKGSPEDNEQKQLFVEQHKHYLDEIIEQISEFSKRVILADANLDKVLSAYNKHRDKPI
REQAENIIHLFTLTNLGAPAAFKYFDTTIDRKRYTSTKEVLDATLIHQSITGLYETRIDLSQ
LGGD.

[0214] A base editor comprising a polynucleotide programmable nucleotide binding domain comprising a nickase domain is thus able to generate a single-strand DNA break (nick) at a specific polynucleotide target sequence (e.g., determined by the complementary sequence of a bound guide nucleic acid). In some embodiments, the strand of a nucleic acid duplex target polynucleotide sequence that is cleaved by a base editor comprising a nickase domain (e.g., Cas9-derived nickase domain) is the strand that is not edited by the base editor (i.e., the strand that is cleaved by the base editor is opposite to a strand comprising a base to be edited). In other embodiments, a base editor comprising a nickase domain (e.g., Cas9-derived nickase domain) can cleave the strand of a DNA molecule which is being targeted for editing. In such embodiments, the non-targeted strand is not cleaved.

[0215] Also provided herein are base editors comprising a polynucleotide programmable nucleotide binding domain which is catalytically dead (i.e., incapable of cleaving a target polynucleotide sequence). Herein the terms “catalytically dead” and “nuclease dead” are used interchangeably to refer to a polynucleotide programmable nucleotide binding domain which has one or more mutations and/or deletions resulting in its inability to cleave a strand of a nucleic acid. In some embodiments, a catalytically dead polynucleotide programmable nucleotide binding domain base editor can lack nuclease activity as a result of specific point mutations in one or more nuclease domains. For example, in the case of a base editor comprising a Cas9 domain, the Cas9 can comprise both a D10A mutation and an H840A mutation. Such mutations inactivate both nuclease domains, thereby resulting in the loss of nuclease activity. In other embodiments, a catalytically dead polynucleotide programmable nucleotide binding domain can comprise one or more deletions of all or a portion of a catalytic domain (e.g., RuvC1 and/or HNH domains). In further embodiments, a catalytically dead polynucleotide programmable nucleotide binding domain comprises a point mutation (e.g., D10A or H840A) as well as a deletion of all or a portion of a nuclease domain.

[0216] Also contemplated herein are mutations capable of generating a catalytically dead polynucleotide programmable nucleotide binding domain from a previously functional version of the polynucleotide programmable nucleotide binding domain. For example, in the case of catalytically dead Cas9 (“dCas9”), variants having mutations other than D10A and H840A are provided, which result in nuclease inactivated Cas9. Such mutations, by way of example, include other amino acid substitutions at D10 and H840, or other substitutions within the nuclease domains of Cas9 (e.g., substitutions in the HNH nuclease subdomain and/or the RuvC1 subdomain). Additional suitable nuclease-inactive dCas9 domains can be apparent to those of skill in the art based on this disclosure and knowledge in the field, and are within the scope of this disclosure. Such additional exemplary suitable nuclease-inactive Cas9 domains include, but are not limited to, D10A/H840A, D10A/D839A/H840A, and D10A/D839A/H840A/N863A mutant domains (See, e.g., Prashant et al., CAS9 transcriptional activators for target specificity screening and paired nickases for cooperative genome engineering. Nature Biotechnology. 2013; 31(9): 833-838, the entire contents of which are incorporated herein by reference).

[0217] Non-limiting examples of a polynucleotide programmable nucleotide binding domain which can be incorporated into a base editor include a CRISPR protein-derived domain, a restriction nuclease, a meganuclease, TAL nuclease (TALEN), and a zinc finger nuclease (ZFN). In some embodiments, a base editor comprises a polynucleotide programmable nucleotide binding domain comprising a natural or modified protein or portion thereof which via a bound guide nucleic acid is capable of binding to a nucleic acid sequence during CRISPR (i.e., Clustered Regularly Interspaced Short Palindromic Repeats)-mediated modification of a nucleic acid. Such a protein is referred to herein as a “CRISPR protein.” Accordingly, disclosed herein is a base editor comprising a polynucleotide programmable nucleotide binding domain comprising all or a portion of a CRISPR protein (i.e. a base editor comprising as a domain all or a portion of a CRISPR protein, also referred to as a “CRISPR protein-derived domain” of the base editor). A CRISPR protein-derived domain incorporated into a base editor can be modified compared to a wild-type or natural version of the CRISPR protein. For example, as described below a CRISPR protein-derived domain can comprise one or more mutations, insertions, deletions, rearrangements and/or recombinations relative to a wild-type or natural version of the CRISPR protein.

[0218] CRISPR is an adaptive immune system that provides protection against mobile genetic elements (viruses, transposable elements and conjugative plasmids). CRISPR clusters contain spacers, sequences complementary to antecedent mobile elements, and target invading nucleic acids. CRISPR clusters are transcribed and processed into CRISPR RNA (crRNA). In type II CRISPR systems, correct processing of pre-crRNA requires a trans-encoded small RNA (tracrRNA), endogenous ribonuclease 3 (mc) and a Cas9 protein. The tracrRNA serves as a guide for ribonuclease 3-aided processing of pre-crRNA. Subsequently, Cas9/crRNA/tracrRNA endonucleolytically cleaves linear or circular dsDNA target complementary to the spacer. The target strand not complementary to crRNA is first cut endonucleolytically, and then trimmed 3′-5′ exonucleolytically. In nature, DNA-binding and cleavage typically requires protein and both RNAs. However, single guide RNAs (“sgRNA,” or simply “gRNA”) can be engineered so as to incorporate aspects of both the crRNA and tracrRNA into a single RNA species. See, e.g., Jinek M., Chylinski K., Fonfara I., Hauer M., Doudna J. A., Charpentier E. Science 337:816-821(2012), the entire contents of which is hereby incorporated by reference. Cas9 recognizes a short motif in the CRISPR repeat sequences (the PAM or protospacer adjacent motif) to help distinguish self versus non-self.

[0219] In some embodiments, the methods described herein can utilize an engineered Cas protein. A guide RNA (gRNA) is a short synthetic RNA composed of a scaffold sequence necessary for Cas-binding and a user-defined ˜20 nucleotide spacer that defines the genomic target to be modified. Thus, a skilled artisan can change the genomic target of the Cas protein specificity is partially determined by how specific the gRNA targeting sequence is for the genomic target compared to the rest of the genome.

[0220] In some embodiments, the gRNA scaffold sequence is as follows:

GUUUUAGAGC UAGAAAUAGC AAGUUAAAAU AAGGCUAGUC
CGUUAUCAAC UUGAAAAAGU GGCACCGAGU CGGUGCUUUU.

[0221] In some embodiments, a CRISPR protein-derived domain incorporated into a base editor is an endonuclease (e.g., deoxyribonuclease or ribonuclease) capable of binding a target polynucleotide when in conjunction with a bound guide nucleic acid. In some embodiments, a CRISPR protein-derived domain incorporated into a base editor is a nickase capable of binding a target polynucleotide when in conjunction with a bound guide nucleic acid. In some embodiments, a CRISPR protein-derived domain incorporated into a base editor is a catalytically dead domain capable of binding a target polynucleotide when in conjunction with a bound guide nucleic acid. In some embodiments, a target polynucleotide bound by a CRISPR protein derived domain of a base editor is DNA. In some embodiments, a target polynucleotide bound by a CRISPR protein-derived domain of a base editor is RNA.

[0222] Cas proteins that can be used herein include class 1 and class 2. Non-limiting examples of Cas proteins include Cas1, Cas1B, Cas2, Cas3, Cas4, Cas5, Cas5d, Cas5t, Cas5h, Cas5a, Cas6, Cas7, Cas8, Cas9 (also known as Csn1 or Csx12), Cas10, Csy1 , Csy2, Csy3, Csy4, Cse1, Cse2, Cse3, Cse4, Cse5e, Csc1, Csc2, Csa5, Csn1, Csn2, Csm1, Csm2, Csm3, Csm4, Csm5, Csm6, Cmr1, Cmr3, Cmr4, Cmr5, Cmr6, Csb1, Csb2, Csb3, Csx17, Csx14, Csx10, Csx16, CsaX, Csx3, Csx1, Csx1S, Csf1, Csf2, CsO, Csf4, Csd1, Csd2, Cst1, Cst2, Csh1, Csh2, Csa1, Csa2, Csa3, Csa4, Csa5, Cas12a/Cpf1, Cas12b/C2c1, Cas12c/C2c3, Cas12d/CasY, Cas12e/CasX, Cas12g, Cas12h, and Cas12i, CARF, DinG, homologues thereof, or modified versions thereof. An unmodified CRISPR enzyme can have DNA cleavage activity, such as Cas9, which has two functional endonuclease domains: RuvC and HNH. A CRISPR enzyme can direct cleavage of one or both strands at a target sequence, such as within a target sequence and/or within a complement of a target sequence. For example, a CRISPR enzyme can direct cleavage of one or both strands within about 1, 2, 3, 4, 5, 6, 7, 8, 9, 10, 15, 20, 25, 50, 100, 200, 500, or more base pairs from the first or last nucleotide of a target sequence.

[0223] A vector that encodes a CRISPR enzyme that is mutated to with respect, to a corresponding wild-type enzyme such that the mutated CRISPR enzyme lacks the ability to cleave one or both strands of a target polynucleotide containing a target sequence can be used. Cas9 can refer to a polypeptide with at least or at least about 50%, 60%, 70%, 80%, 90%, 91%, 92%, 93%, 94%, 95%, 96%, 97%, 98%, 99%, or 100% sequence identity and/or sequence homology to a wild-type exemplary Cas9 polypeptide (e.g., Cas9 from S. pyogenes). Cas9 can refer to a polypeptide with at most or at most about 50%, 60%, 70%, 80%, 90%, 91%, 92%, 93%, 94%, 95%, 96%, 97%, 98%, 99%, or 100% sequence identity and/or sequence homology to a wild-type exemplary Cas9 polypeptide (e.g., from S. pyogenes). Cas9 can refer to the wild-type or a modified form of the Cas9 protein that can comprise an amino acid change such as a deletion, insertion, substitution, variant, mutation, fusion, chimera, or any combination thereof.

[0224] In some embodiments, a CRISPR protein-derived domain of a base editor can include all or a portion of Cas9 from Corynebacterium ulcerans (NCBI Refs: NC_015683.1, NC_017317.1); Corynebacterium diphtheria (NCBI Refs: NC_016782.1, NC_016786.1); Spiroplasma syrphidicola (NCBI Ref: NC_021284.1); Prevotella intermedia (NCBI Ref: NC_017861.1); Spiroplasma taiwanense (NCBI Ref: NC_021846.1); Streptococcus iniae (NCBI Ref: NC_021314.1); Belliella baltica (NCBI Ref: NC_018010.1); Psychroflexus torquis (NCBI Ref: NC_018721.1); Streptococcus thermophilus (NCBI Ref: YP_820832.1); Listeria innocua (NCBI Ref: NP 472073.1); Campylobacter jejuni (NCBI Ref: YP_002344900.1); Neisseria meningitidis (NCBI Ref: YP_002342100.1), Streptococcus pyogenes, or Staphylococcus aureus.

### Cas9 Domains of Nucleobase Editors

[0225] Cas9 nuclease sequences and structures are well known to those of skill in the art (See, e.g., “Complete genome sequence of an M1 strain of Streptococcus pyogenes.” Ferretti et al., J. J., McShan W. M., Ajdic D. J., Savic D. J., Savic G., Lyon K., Primeaux C, Sezate S., Suvorov A. N., Kenton S., Lai H. S., Lin S. P., Qian Y., Jia H. G., Najar F. Z., Ren Q., Zhu H., Song L., White J., Yuan X., Clifton S. W., Roe B. A., McLaughlin R. E., Proc. Natl. Acad. Sci. U.S.A. 98:4658-4663(2001); “CRISPR RNA maturation by trans-encoded small RNA and host factor RNase III.” Deltcheva E., Chylinski K., Sharma C. M., Gonzales K., Chao Y., Pirzada Z. A., Eckert M. R., Vogel J Charpentier E., Nature 471:602-607(2011); and “A programmable dual-RNA-guided DNA endonuclease in adaptive bacterial immunity.” Jinek M., Chylinski K., Fonfara I., Hauer M., Doudna J. A., Charpentier E. Science 337:816-821(2012), the entire contents of each of which are incorporated herein by reference). Cas9 orthologs have been described in various species, including, but not limited to, S. pyogenes and S. thermophilus. Additional suitable Cas9 nucleases and sequences will be apparent to those of skill in the art based on this disclosure, and such Cas9 nucleases and sequences include Cas9 sequences from the organisms and loci disclosed in Chylinski, Rhun, and Charpentier, “The tracrRNA and Cas9 families of type II CRISPR-Cas immunity systems” (2013) RNA Biology 10:5, 726-737; the entire contents of which are incorporated herein by reference.

[0226] In some embodiments, a nucleic acid programmable DNA binding protein (napDNAbp) is a Cas9 domain. Non-limiting, exemplary Cas9 domains are provided herein. The Cas9 domain may be a nuclease active Cas9 domain, a nuclease inactive Cas9 domain (dCas9), or a Cas9 nickase (nCas9). In some embodiments, the Cas9 domain is a nuclease active domain. For example, the Cas9 domain may be a Cas9 domain that cuts both strands of a duplexed nucleic acid (e.g., both strands of a duplexed DNA molecule). In some embodiments, the Cas9 domain comprises any one of the amino acid sequences as set forth herein. In some embodiments the Cas9 domain comprises an amino acid sequence that is at least 60%, at least 65%, at least 70%, at least 75%, at least 80%, at least 85%, at least 90%, at least 95%, at least 96%, at least 97%, at least 98%, at least 99%, or at least 99.5% identical to any one of the amino acid sequences set forth herein. In some embodiments, the Cas9 domain comprises an amino acid sequence that has 1, 2, 3, 4, 5, 6, 7, 8, 9, 10, 11, 12, 13, 14, 15, 16, 17, 18, 19, 20, 21, 22, 21, 24, 25, 26, 27, 28, 29, 30, 31, 32, 33, 34, 35, 36, 37, 38, 39, 40, 41, 42, 43, 44, 45, 46, 47, 48, 49, 50 or more mutations compared to any one of the amino acid sequences set forth herein. In some embodiments, the Cas9 domain comprises an amino acid sequence that has at least 10, at least 15, at least 20, at least 30, at least 40, at least 50, at least 60, at least 70, at least 80, at least 90, at least 100, at least 150, at least 200, at least 250, at least 300, at least 350, at least 400, at least 500, at least 600, at least 700, at least 800, at least 900, at least 1000, at least 1100, or at least 1200 identical contiguous amino acid residues as compared to any one of the amino acid sequences set forth herein.

[0227] In some embodiments, proteins comprising fragments of Cas9 are provided. For example, in some embodiments, a protein comprises one of two Cas9 domains: (1) the gRNA binding domain of Cas9; or (2) the DNA cleavage domain of Cas9. In some embodiments, proteins comprising Cas9 or fragments thereof are referred to as “Cas9 variants.” A Cas9 variant shares homology to Cas9, or a fragment thereof. For example, a Cas9 variant is at least about 70% identical, at least about 80% identical, at least about 90% identical, at least about 95% identical, at least about 96% identical, at least about 97% identical, at least about 98% identical, at least about 99% identical, at least about 99.5% identical, or at least about 99.9% identical to wild-type Cas9. In some embodiments, the Cas9 variant may have 1, 2, 3, 4, 5, 6, 7, 8, 9, 10, 11, 12, 13, 14, 15, 16, 17, 18, 19, 20, 21, 22, 21, 24, 25, 26, 27, 28, 29, 30, 31, 32, 33, 34, 35, 36, 37, 38, 39, 40, 41, 42, 43, 44, 45, 46, 47, 48, 49, 50 or more amino acid changes compared to wild-type Cas9. In some embodiments, the Cas9 variant comprises a fragment of Cas9 (e.g., a gRNA binding domain or a DNA-cleavage domain), such that the fragment is at least about 70% identical, at least about 80% identical, at least about 90% identical, at least about 95% identical, at least about 96% identical, at least about 97% identical, at least about 98% identical, at least about 99% identical, at least about 99.5% identical, or at least about 99.9% identical to the corresponding fragment of wild-type Cas9. In some embodiments, the fragment is at least 30%, at least 35%, at least 40%, at least 45%, at least 50%, at least 55%, at least 60%, at least 65%, at least 70%, at least 75%, at least 80%, at least 85%, at least 90%, at least 95% identical, at least 96%, at least 97%, at least 98%, at least 99%, or at least 99.5% of the amino acid length of a corresponding wild-type Cas9. In some embodiments, the fragment is at least 100 amino acids in length. In some embodiments, the fragment is at least 100, 150, 200, 250, 300, 350, 400, 450, 500, 550, 600, 650, 700, 750, 800, 850, 900, 950, 1000, 1050, 1100, 1150, 1200, 1250, or at least 1300 amino acids in length.

In some embodiments, Cas9 fusion proteins as provided herein comprise the full-length amino acid sequence of a Cas9 protein, e.g., one of the Cas9 sequences provided herein. In other embodiments, however, fusion proteins as provided herein do not comprise a full-length Cas9 sequence, but only one or more fragments thereof. Exemplary amino acid sequences of suitable Cas9 domains and Cas9 fragments are provided herein, and additional suitable sequences of Cas9 domains and fragments will be apparent to those of skill in the art.

[0228] A Cas9 protein can associate with a guide RNA that guides the Cas9 protein to a specific DNA sequence that has complementary to the guide RNA. In some embodiments, the polynucleotide programmable nucleotide binding domain is a Cas9 domain, for example a nuclease active Cas9, a Cas9 nickase (nCas9), or a nuclease inactive Cas9 (dCas9). Examples of nucleic acid programmable DNA binding proteins include, without limitation, Cas9 (e.g., dCas9 and nCas9), CasX, CasY, Cpf1, Cas12b/C2c1, and Cas12c/C2c3. In some embodiments, wild-type Cas9 corresponds to Cas9 from Streptococcus pyogenes (NCBI Reference Sequence: NC_017053.1, nucleotide and amino acid sequences as follows).

ATGGATAAGAAATACTCAATAGGCTTAGATATCGGCACAAATAGCGTCGGATGGGCGGTGAT
CACTGATGATTATAAGGTTCCGTCTAAAAAGTTCAAGGTTCTGGGAAATACAGACCGCCACA
GTATCAAAAAAAATCTTATAGGGGCTCTTTTATTTGGCAGTGGAGAGACAGCGGAAGCGACT
CGTCTCAAACGGACAGCTCGTAGAAGGTATACACGTCGGAAGAATCGTATTTGTTATCTACA
GGAGATTTTTTCAAATGAGATGGCGAAAGTAGATGATAGTTTCTTTCATCGACTTGAAGAGT
CTTTTTTGGTGGAAGAAGACAAGAAGCATGAACGTCATCCTATTTTTGGAAATATAGTAGAT
GAAGTTGCTTATCATGAGAAATATCCAACTATCTATCATCTGCGAAAAAAATTGGCAGATTC
TACTGATAAAGCGGATTTGCGCTTAATCTATTTGGCCTTAGCGCATATGATTAAGTTTCGTG
GTCATTTTTTGATTGAGGGAGATTTAAATCCTGATAATAGTGATGTGGACAAACTATTTATC
CAGTTGGTACAAATCTACAATCAATTATTTGAAGAAAACCCTATTAACGCAAGTAGAGTAGA
TGCTAAAGCGATTCTTTCTGCACGATTGAGTAAATCAAGACGATTAGAAAATCTCATTGCTC
AGCTCCCCGGTGAGAAGAGAAATGGCTTGTTTGGGAATCTCATTGCTTTGTCATTGGGATTG
ACCCCTAATTTTAAATCAAATTTTGATTTGGCAGAAGATGCTAAATTACAGCTTTCAAAAGA
TACTTACGATGATGATTTAGATAATTTATTGGCGCAAATTGGAGATCAATATGCTGATTTGT
TTTTGGCAGCTAAGAATTTATCAGATGCTATTTTACTTTCAGATATCCTAAGAGTAAATAGT
GAAATAACTAAGGCTCCCCTATCAGCTTCAATGATTAAGCGCTACGATGAACATCATCAAGA
CTTGACTCTTTTAAAAGCTTTAGTTCGACAACAACTTCCAGAAAAGTATAAAGAAATCTTTT
TTGATCAATCAAAAAACGGATATGCAGGTTATATTGATGGGGGAGCTAGCCAAGAAGAATTT
TATAAATTTATCAAACCAATTTTAGAAAAAATGGATGGTACTGAGGAATTATTGGTGAAACT
AAATCGTGAAGATTTGCTGCGCAAGCAACGGACCTTTGACAACGGCTCTATTCCCCATCAAA
TTCACTTGGGTGAGCTGCATGCTATTTTGAGAAGACAAGAAGACTTTTATCCATTTTTAAAA
GACAATCGTGAGAAGATTGAAAAAATCTTGACTTTTCGAATTCCTTATTATGTTGGTCCATT
GGCGCGTGGCAATAGTCGTTTTGCATGGATGACTCGGAAGTCTGAAGAAACAATTACCCCAT
GGAATTTTGAAGAAGTTGTCGATAAAGGTGCTTCAGCTCAATCATTTATTGAACGCATGACA
AACTTTGATAAAAATCTTCCAAATGAAAAAGTACTACCAAAACATAGTTTGCTTTATGAGTA
TTTTACGGTTTATAACGAATTGACAAAGGTCAAATATGTTACTGAGGGAATGCGAAAACCAG
CATTTCTTTCAGGTGAACAGAAGAAAGCCATTGTTGATTTACTCTTCAAAACAAATCGAAAA
GTAACCGTTAAGCAATTAAAAGAAGATTATTTCAAAAAAATAGAATGTTTTGATAGTGTTGA
AATTTCAGGAGTTGAAGATAGATTTAATGCTTCATTAGGCGCCTACCATGATTTGCTAAAAA
TTATTAAAGATAAAGATTTTTTGGATAATGAAGAAAATGAAGATATCTTAGAGGATATTGTT
TTAACATTGACCTTATTTGAAGATAGGGGGATGATTGAGGAAAGACTTAAAACATATGCTCA
CCTCTTTGATGATAAGGTGATGAAACAGCTTAAACGTCGCCGTTATACTGGTTGGGGACGTT
TGTCTCGAAAATTGATTAATGGTATTAGGGATAAGCAATCTGGCAAAACAATATTAGATTTT
TTGAAATCAGATGGTTTTGCCAATCGCAATTTTATGCAGCTGATCCATGATGATAGTTTGAC
ATTTAAAGAAGATATTCAAAAAGCACAGGTGTCTGGACAAGGCCATAGTTTACATGAACAGA
TTGCTAACTTAGCTGGCAGTCCTGCTATTAAAAAAGGTATTTTACAGACTGTAAAAATTGTT
GATGAACTGGTCAAAGTAATGGGGCATAAGCCAGAAAATATCGTTATTGAAATGGCACGTGA
AAATCAGACAACTCAAAAGGGCCAGAAAAATTCGCGAGAGCGTATGAAACGAATCGAAGAAG
GTATCAAAGAATTAGGAAGTCAGATTCTTAAAGAGCATCCTGTTGAAAATACTCAATTGCAA
AATGAAAAGCTCTATCTCTATTATCTACAAAATGGAAGAGACATGTATGTGGACCAAGAATT
AGATATTAATCGTTTAAGTGATTATGATGTCGATCACATTGTTCCACAAAGTTTCATTAAAG
ACGATTCAATAGACAATAAGGTACTAACGCGTTCTGATAAAAATCGTGGTAAATCGGATAAC
GTTCCAAGTGAAGAAGTAGTCAAAAAGATGAAAAACTATTGGAGACAACTTCTAAACGCCAA
GTTAATCACTCAACGTAAGTTTGATAATTTAACGAAAGCTGAACGTGGAGGTTTGAGTGAAC
TTGATAAAGCTGGTTTTATCAAACGCCAATTGGTTGAAACTCGCCAAATCACTAAGCATGTG
GCACAAATTTTGGATAGTCGCATGAATACTAAATACGATGAAAATGATAAACTTATTCGAGA
GGTTAAAGTGATTACCTTAAAATCTAAATTAGTTTCTGACTTCCGAAAAGATTTCCAATTCT
ATAAAGTACGTGAGATTAACAATTACCATCATGCCCATGATGCGTATCTAAATGCCGTCGTT
GGAACTGCTTTGATTAAGAAATATCCAAAACTTGAATCGGAGTTTGTCTATGGTGATTATAA
AGTTTATGATGTTCGTAAAATGATTGCTAAGTCTGAGCAAGAAATAGGCAAAGCAACCGCAA
AATATTTCTTTTACTCTAATATCATGAACTTCTTCAAAACAGAAATTACACTTGCAAATGGA
GAGATTCGCAAACGCCCTCTAATCGAAACTAATGGGGAAACTGGAGAAATTGTCTGGGATAA
AGGGCGAGATTTTGCCACAGTGCGCAAAGTATTGTCCATGCCCCAAGTCAATATTGTCAAGA
AAACAGAAGTACAGACAGGCGGATTCTCCAAGGAGTCAATTTTACCAAAAAGAAATTCGGAC
AAGCTTATTGCTCGTAAAAAAGACTGGGATCCAAAAAAATATGGTGGTTTTGATAGTCCAAC
GGTAGCTTATTCAGTCCTAGTGGTTGCTAAGGTGGAAAAAGGGAAATCGAAGAAGTTAAAAT
CCGTTAAAGAGTTACTAGGGATCACAATTATGGAAAGAAGTTCCTTTGAAAAAAATCCGATT
GACTTTTTAGAAGCTAAAGGATATAAGGAAGTTAAAAAAGACTTAATCATTAAACTACCTAA
ATATAGTCTTTTTGAGTTAGAAAACGGTCGTAAACGGATGCTGGCTAGTGCCGGAGAATTAC
AAAAAGGAAATGAGCTGGCTCTGCCAAGCAAATATGTGAATTTTTTATATTTAGCTAGTCAT
TATGAAAAGTTGAAGGGTAGTCCAGAAGATAACGAACAAAAACAATTGTTTGTGGAGCAGCA
TAAGCATTATTTAGATGAGATTATTGAGCAAATCAGTGAATTTTCTAAGCGTGTTATTTTAG
CAGATGCCAATTTAGATAAAGTTCTTAGTGCATATAACAAACATAGAGACAAACCAATACGT
GAACAAGCAGAAAATATTATTCATTTATTTACGTTGACGAATCTTGGAGCTCCCGCTGCTTT
TAAATATTTTGATACAACAATTGATCGTAAACGATATACGTCTACAAAAGAAGTTTTAGATG
CCACTCTTATCCATCAATCCATCACTGGTCTTTATGAAACACGCATTGATTTGAGTCAGCTA
GGAGGTGACTGA
MDKKYSIGLDIGTNSVGWAVITDDYKVPSKKFKVLGNTDRHSIKKNLIGALLFGSGETAEAT
RLKRTARRRYTRRKNRICYLQEIFSNEMAKVDDSFFHRLEESFLVEEDKKHERHPIFGNIVD
EVAYHEKYPTIYHLRKKLADSTDKADLRLIYLALAHMIKFRGHFLIEGDLNPDNSDVDKLFI
QLVQIYNQLFEENPINASRVDAKAILSARLSKSRRLENLIAQLPGEKRNGLFGNLIALSLGL
TPNFKSNFDLAEDAKLQLSKDTYDDDLDNLLAQIGDQYADLFLAAKNLSDAILLSDILRVNS
EITKAPLSASMIKRYDEHHQDLTLLKALVRQQLPEKYKEIFFDQSKNGYAGYIDGGASQEEF
YKFIKPILEKMDGTEELLVKLNREDLLRKQRTFDNGSIPHQIHLGELHAILRRQEDFYPFLK
DNREKIEKILTFRIPYYVGPLARGNSRFAWMTRKSEETITPWNFEEVVDKGASAQSFIERMT
NFDKNLPNEKVLPKHSLLYEYFTVYNELTKVKYVTEGMRKPAFLSGEQKKAIVDLLFKTNRK
VTVKQLKEDYFKKIECFDSVEISGVEDRFNASLGAYHDLLKIIKDKDFLDNEENEDILEDIV
LTLTLFEDRGMIEERLKTYAHLFDDKVMKQLKRRRYTGWGRLSRKLINGIRDKQSGKTILDF
LKSDGFANRNFMQLIHDDSLTFKEDIQKAQVSGQGHSLHEQIANLAGSPAIKKGILQTVKIV
DELVKVMGHKPENIVIEMARENQTTQKGQKNSRERMKRIEEGIKELGSQILKEHPVENTQLQ
NEKLYLYYLQNGRDMYVDQELDINRLSDYDVDHIVPQSFIKDDSIDNKVLTRSDKNRGKSDN
VPSEEVVKKMKNYWRQLLNAKLITQRKFDNLTKAERGGLSELDKAGFIKRQLVETRQITKHV
AQILDSRMNTKYDENDKLIREVKVITLKSKLVSDFRKDFQFYKVREINNYHHAHDAYLNAVV
GTALIKKYPKLESEFVYGDYKVYDVRKMIAKSEQEIGKATAKYFFYSNIMNFFKTEITLANG
EIRKRPLIETNGETGEIVWDKGRDFATVRKVLSMPQVNIVKKTEVQTGGFSKESILPKRNSD
KLIARKKDWDPKKYGGFDSPTVAYSVLVVAKVEKGKSKKLKSVKELLGITIMERSSFEKNPI
DFLEAKGYKEVKKDLIIKLPKYSLFELENGRKRMLASAGELQKGNELALPSKYVNFLYLASH
YEKLKGSPEDNEQKQLFVEQHKHYLDEIIEQISEFSKRVILADANLDKVLSAYNKHRDKPIR
EQAENIIHLFTLTNLGAPAAFKYFDTTIDRKRYTSTKEVLDATLIHQSITGLYETRIDLSQL
GGD

(single underline: HNH domain; double underline: RuvC domain)

[0229] In some embodiments, wild-type Cas9 corresponds to, or comprises the following nucleotide and/or amino acid sequences:

ATGGATAAAAAGTATTCTATTGGTTTAGACATCGGCACTAATTCCGTTGGATGGGCTGTCAT
AACCGATGAATACAAAGTACCTTCAAAGAAATTTAAGGTGTTGGGGAACACAGACCGTCATT
CGATTAAAAAGAATCTTATCGGTGCCCTCCTATTCGATAGTGGCGAAACGGCAGAGGCGACT
CGCCTGAAACGAACCGCTCGGAGAAGGTATACACGTCGCAAGAACCGAATATGTTACTTACA
AGAAATTTTTAGCAATGAGATGGCCAAAGTTGACGATTCTTTCTTTCACCGTTTGGAAGAGT
CCTTCCTTGTCGAAGAGGACAAGAAACATGAACGGCACCCCATCTTTGGAAACATAGTAGAT
GAGGTGGCATATCATGAAAAGTACCCAACGATTTATCACCTCAGAAAAAAGCTAGTTGACTC
AACTGATAAAGCGGACCTGAGGTTAATCTACTTGGCTCTTGCCCATATGATAAAGTTCCGTG
GGCACTTTCTCATTGAGGGTGATCTAAATCCGGACAACTCGGATGTCGACAAACTGTTCATC
CAGTTAGTACAAACCTATAATCAGTTGTTTGAAGAGAACCCTATAAATGCAAGTGGCGTGGA
TGCGAAGGCTATTCTTAGCGCCCGCCTCTCTAAATCCCGACGGCTAGAAAACCTGATCGCAC
AATTACCCGGAGAGAAGAAAAATGGGTTGTTCGGTAACCTTATAGCGCTCTCACTAGGCCTG
ACACCAAATTTTAAGTCGAACTTCGACTTAGCTGAAGATGCCAAATTGCAGCTTAGTAAGGA
CACGTACGATGACGATCTCGACAATCTACTGGCACAAATTGGAGATCAGTATGCGGACTTAT
TTTTGGCTGCCAAAAACCTTAGCGATGCAATCCTCCTATCTGACATACTGAGAGTTAATACT
GAGATTACCAAGGCGCCGTTATCCGCTTCAATGATCAAAAGGTACGATGAACATCACCAAGA
CTTGACACTTCTCAAGGCCCTAGTCCGTCAGCAACTGCCTGAGAAATATAAGGAAATATTCT
TTGATCAGTCGAAAAACGGGTACGCAGGTTATATTGACGGCGGAGCGAGTCAAGAGGAATTC
TACAAGTTTATCAAACCCATATTAGAGAAGATGGATGGGACGGAAGAGTTGCTTGTAAAACT
CAATCGCGAAGATCTACTGCGAAAGCAGCGGACTTTCGACAACGGTAGCATTCCACATCAAA
TCCACTTAGGCGAATTGCATGCTATACTTAGAAGGCAGGAGGATTTTTATCCGTTCCTCAAA
GACAATCGTGAAAAGATTGAGAAAATCCTAACCTTTCGCATACCTTACTATGTGGGACCCCT
GGCCCGAGGGAACTCTCGGTTCGCATGGATGACAAGAAAGTCCGAAGAAACGATTACTCCAT
GGAATTTTGAGGAAGTTGTCGATAAAGGTGCGTCAGCTCAATCGTTCATCGAGAGGATGACC
AACTTTGACAAGAATTTACCGAACGAAAAAGTATTGCCTAAGCACAGTTTACTTTACGAGTA
TTTCACAGTGTACAATGAACTCACGAAAGTTAAGTATGTCACTGAGGGCATGCGTAAACCCG
CCTTTCTAAGCGGAGAACAGAAGAAAGCAATAGTAGATCTGTTATTCAAGACCAACCGCAAA
GTGACAGTTAAGCAATTGAAAGAGGACTACTTTAAGAAAATTGAATGCTTCGATTCTGTCGA
GATCTCCGGGGTAGAAGATCGATTTAATGCGTCACTTGGTACGTATCATGACCTCCTAAAGA
TAATTAAAGATAAGGACTTCCTGGATAACGAAGAGAATGAAGATATCTTAGAAGATATAGTG
TTGACTCTTACCCTCTTTGAAGATCGGGAAATGATTGAGGAAAGACTAAAAACATACGCTCA
CCTGTTCGACGATAAGGTTATGAAACAGTTAAAGAGGCGTCGCTATACGGGCTGGGGACGAT
TGTCGCGGAAACTTATCAACGGGATAAGAGACAAGCAAAGTGGTAAAACTATTCTCGATTTT
CTAAAGAGCGACGGCTTCGCCAATAGGAACTTTATGCAGCTGATCCATGATGACTCTTTAAC
CTTCAAAGAGGATATACAAAAGGCACAGGTTTCCGGACAAGGGGACTCATTGCACGAACATA
TTGCGAATCTTGCTGGTTCGCCAGCCATCAAAAAGGGCATACTCCAGACAGTCAAAGTAGTG
GATGAGCTAGTTAAGGTCATGGGACGTCACAAACCGGAAAACATTGTAATCGAGATGGCACG
CGAAAATCAAACGACTCAGAAGGGGCAAAAAAACAGTCGAGAGCGGATGAAGAGAATAGAAG
AGGGTATTAAAGAACTGGGCAGCCAGATCTTAAAGGAGCATCCTGTGGAAAATACCCAATTG
CAGAACGAGAAACTTTACCTCTATTACCTACAAAATGGAAGGGACATGTATGTTGATCAGGA
ACTGGACATAAACCGTTTATCTGATTACGACGTCGATCACATTGTACCCCAATCCTTTTTGA
AGGACGATTCAATCGACAATAAAGTGCTTACACGCTCGGATAAGAACCGAGGGAAAAGTGAC
AATGTTCCAAGCGAGGAAGTCGTAAAGAAAATGAAGAACTATTGGCGGCAGCTCCTAAATGC
GAAACTGATAACGCAAAGAAAGTTCGATAACTTAACTAAAGCTGAGAGGGGTGGCTTGTCTG
AACTTGACAAGGCCGGATTTATTAAACGTCAGCTCGTGGAAACCCGCCAAATCACAAAGCAT
GTTGCACAGATACTAGATTCCCGAATGAATACGAAATACGACGAGAACGATAAGCTGATTCG
GGAAGTCAAAGTAATCACTTTAAAGTCAAAATTGGTGTCGGACTTCAGAAAGGATTTTCAAT
TCTATAAAGTTAGGGAGATAAATAACTACCACCATGCGCACGACGCTTATCTTAATGCCGTC
GTAGGGACCGCACTCATTAAGAAATACCCGAAGCTAGAAAGTGAGTTTGTGTATGGTGATTA
CAAAGTTTATGACGTCCGTAAGATGATCGCGAAAAGCGAACAGGAGATAGGCAAGGCTACAG
CCAAATACTTCTTTTATTCTAACATTATGAATTTCTTTAAGACGGAAATCACTCTGGCAAAC
GGAGAGATACGCAAACGACCTTTAATTGAAACCAATGGGGAGACAGGTGAAATCGTATGGGA
TAAGGGCCGGGACTTCGCGACGGTGAGAAAAGTTTTGTCCATGCCCCAAGTCAACATAGTAA
AGAAAACTGAGGTGCAGACCGGAGGGTTTTCAAAGGAATCGATTCTTCCAAAAAGGAATAGT
GATAAGCTCATCGCTCGTAAAAAGGACTGGGACCCGAAAAAGTACGGTGGCTTCGATAGCCC
TACAGTTGCCTATTCTGTCCTAGTAGTGGCAAAAGTTGAGAAGGGAAAATCCAAGAAACTGA
AGTCAGTCAAAGAATTATTGGGGATAACGATTATGGAGCGCTCGTCTTTTGAAAAGAACCCC
ATCGACTTCCTTGAGGCGAAAGGTTACAAGGAAGTAAAAAAGGATCTCATAATTAAACTACC
AAAGTATAGTCTGTTTGAGTTAGAAAATGGCCGAAAACGGATGTTGGCTAGCGCCGGAGAGC
TTCAAAAGGGGAACGAACTCGCACTACCGTCTAAATACGTGAATTTCCTGTATTTAGCGTCC
CATTACGAGAAGTTGAAAGGTTCACCTGAAGATAACGAACAGAAGCAACTTTTTGTTGAGCA
GCACAAACATTATCTCGACGAAATCATAGAGCAAATTTCGGAATTCAGTAAGAGAGTCATCC
TAGCTGATGCCAATCTGGACAAAGTATTAAGCGCATACAACAAGCACAGGGATAAACCCATA
CGTGAGCAGGCGGAAAATATTATCCATTTGTTTACTCTTACCAACCTCGGCGCTCCAGCCGC
ATTCAAGTATTTTGACACAACGATAGATCGCAAACGATACACTTCTACCAAGGAGGTGCTAG
ACGCGACACTGATTCACCATCCAATCACGGGATTATATGAAACTCGGATAGATTTGTCACAG
CTTGGGGGTGACGGATCCCCCAAGAAGAAGAGGAAAGTCTCGAGCGACTACAAAGACCATGA
CGGTGATTATAAAGATCATGACATCGATTACAAGGATGACGATGACAAGGCTGCAGGA
MDKKYSIGLAIGTNSVGWAVITDEYKVPSKKFKVLGNTDRHSIKKNLIGALLFDSGETAEAT
RLKRTARRRYTRRKNRICYLQEIFSNEMAKVDDSFFHRLEESFLVEEDKKHERHPIFGNIVD
EVAYHEKYPTIYHLRKKLVDSTDKADLRLIYLALAHMIKFRGHFLIEGDLNPDNSDVDKLFI
QLVQTYNQLFEENPINASGVDAKAILSARLSKSRRLENLIAQLPGEKKNGLFGNLIALSLGL
TPNFKSNFDLAEDAKLQLSKDTYDDDLDNLLAQIGDQYADLFLAAKNLSDAILLSDILRVNT
EITKAPLSASMIKRYDEHHQDLTLLKALVRQQLPEKYKEIFFDQSKNGYAGYIDGGASQEEF
YKFIKPILEKMDGTEELLVKLNREDLLRKQRTFDNGSIPHQIHLGELHAILRRQEDFYPFLK
DNREKIEKILTFRIPYYVGPLARGNSRFAWMTRKSEETITPWNFEEVVDKGASAQSFIERMT
NFDKNLPNEKVLPKHSLLYEYFTVYNELTKVKYVTEGMRKPAFLSGEQKKAIVDLLFKTNRK
VTVKQLKEDYFKKIECFDSVEISGVEDRFNASLGTYHDLLKIIKDKDFLDNEENEDILEDIV
LTLTLFEDREMIEERLKTYAHLFDDKVMKQLKRRRYTGWGRLSRKLINGIRDKQSGKTILDF
LKSDGFANRNFMQLIHDDSLTFKEDIQKAQVSGQGDSLHEHIANLAGSPAIKKGILQTVKVV
DELVKVMGRHKPENIVIEMARENQTTQKGQKNSRERMKRIEEGIKELGSQILKEHPVENTQL
QNEKLYLYYLQNGRDMYVDQELDINRLSDYDVDHIVPQSFLKDDSIDNKVLTRSDKNRGKSD
NVPSEEVVKKMKNYWRQLLNAKLITQRKFDNLTKAERGGLSELDKAGFIKRQLVETRQITKH
VAQILDSRMNTKYDENDKLIREVKVITLKSKLVSDFRKDFQFYKVREINNYHHAHDAYLNAV
VGTALIKKYPKLESEFVYGDYKVYDVRKMIAKSEQEIGKATAKYFFYSNIMNFFKTEITLAN
GEIRKRPLIETNGETGEIVWDKGRDFATVRKVLSMPQVNIVKKTEVQTGGFSKESILPKRNS
DKLIARKKDWDPKKYGGFDSPTVAYSVLVVAKVEKGKSKKLKSVKELLGITIMERSSFEKNP
IDFLEAKGYKEVKKDLIIKLPKYSLFELENGRKRMLASAGELQKGNELALPSKYVNFLYLAS
HYEKLKGSPEDNEQKQLFVEQHKHYLDEIIEQISEFSKRVILADANLDKVLSAYNKHRDKPI
REQAENIIHLFTLTNLGAPAAFKYFDTTIDRKRYTSTKEVLDATLIHQSITGLYETRIDLSQ
LGGD.

(single underline: HNH domain; double underline: RuvC domain)

[0230] In some embodiments, wild-type Cas9 corresponds to Cas9 from Streptococcus pyogenes (NCBI Reference Sequence: NC_002737.2 (nucleotide sequence as follows); and

[0231] Uniprot Reference Sequence: Q99ZW2 (amino acid sequence as follows):

ATGGATAAGAAATACTCAATAGGCTTAGATATCGGCACAAATAGCGTCGGATGGGCGGTGAT
CACTGATGAATATAAGGTTCCGTCTAAAAAGTTCAAGGTTCTGGGAAATACAGACCGCCACA
GTATCAAAAAAAATCTTATAGGGGCTCTTTTATTTGACAGTGGAGAGACAGCGGAAGCGACT
CGTCTCAAACGGACAGCTCGTAGAAGGTATACACGTCGGAAGAATCGTATTTGTTATCTACA
GGAGATTTTTTCAAATGAGATGGCGAAAGTAGATGATAGTTTCTTTCATCGACTTGAAGAGT
CTTTTTTGGTGGAAGAAGACAAGAAGCATGAACGTCATCCTATTTTTGGAAATATAGTAGAT
GAAGTTGCTTATCATGAGAAATATCCAACTATCTATCATCTGCGAAAAAAATTGGTAGATTC
TACTGATAAAGCGGATTTGCGCTTAATCTATTTGGCCTTAGCGCATATGATTAAGTTTCGTG
GTCATTTTTTGATTGAGGGAGATTTAAATCCTGATAATAGTGATGTGGACAAACTATTTATC
CAGTTGGTACAAACCTACAATCAATTATTTGAAGAAAACCCTATTAACGCAAGTGGAGTAGA
TGCTAAAGCGATTCTTTCTGCACGATTGAGTAAATCAAGACGATTAGAAAATCTCATTGCTC
AGCTCCCCGGTGAGAAGAAAAATGGCTTATTTGGGAATCTCATTGCTTTGTCATTGGGTTTG
ACCCCTAATTTTAAATCAAATTTTGATTTGGCAGAAGATGCTAAATTACAGCTTTCAAAAGA
TACTTACGATGATGATTTAGATAATTTATTGGCGCAAATTGGAGATCAATATGCTGATTTGT
TTTTGGCAGCTAAGAATTTATCAGATGCTATTTTACTTTCAGATATCCTAAGAGTAAATACT
GAAATAACTAAGGCTCCCCTATCAGCTTCAATGATTAAACGCTACGATGAACATCATCAAGA
CTTGACTCTTTTAAAAGCTTTAGTTCGACAACAACTTCCAGAAAAGTATAAAGAAATCTTTT
TTGATCAATCAAAAAACGGATATGCAGGTTATATTGATGGGGGAGCTAGCCAAGAAGAATTT
TATAAATTTATCAAACCAATTTTAGAAAAAATGGATGGTACTGAGGAATTATTGGTGAAACT
AAATCGTGAAGATTTGCTGCGCAAGCAACGGACCTTTGACAACGGCTCTATTCCCCATCAAA
TTCACTTGGGTGAGCTGCATGCTATTTTGAGAAGACAAGAAGACTTTTATCCATTTTTAAAA
GACAATCGTGAGAAGATTGAAAAAATCTTGACTTTTCGAATTCCTTATTATGTTGGTCCATT
GGCGCGTGGCAATAGTCGTTTTGCATGGATGACTCGGAAGTCTGAAGAAACAATTACCCCAT
GGAATTTTGAAGAAGTTGTCGATAAAGGTGCTTCAGCTCAATCATTTATTGAACGCATGACA
AACTTTGATAAAAATCTTCCAAATGAAAAAGTACTACCAAAACATAGTTTGCTTTATGAGTA
TTTTACGGTTTATAACGAATTGACAAAGGTCAAATATGTTACTGAAGGAATGCGAAAACCAG
CATTTCTTTCAGGTGAACAGAAGAAAGCCATTGTTGATTTACTCTTCAAAACAAATCGAAAA
GTAACCGTTAAGCAATTAAAAGAAGATTATTTCAAAAAAATAGAATGTTTTGATAGTGTTGA
AATTTCAGGAGTTGAAGATAGATTTAATGCTTCATTAGGTACCTACCATGATTTGCTAAAAA
TTATTAAAGATAAAGATTTTTTGGATAATGAAGAAAATGAAGATATCTTAGAGGATATTGTT
TTAACATTGACCTTATTTGAAGATAGGGAGATGATTGAGGAAAGACTTAAAACATATGCTCA
CCTCTTTGATGATAAGGTGATGAAACAGCTTAAACGTCGCCGTTATACTGGTTGGGGACGTT
TGTCTCGAAAATTGATTAATGGTATTAGGGATAAGCAATCTGGCAAAACAATATTAGATTTT
TTGAAATCAGATGGTTTTGCCAATCGCAATTTTATGCAGCTGATCCATGATGATAGTTTGAC
ATTTAAAGAAGACATTCAAAAAGCACAAGTGTCTGGACAAGGCGATAGTTTACATGAACATA
TTGCAAATTTAGCTGGTAGCCCTGCTATTAAAAAAGGTATTTTACAGACTGTAAAAGTTGTT
GATGAATTGGTCAAAGTAATGGGGCGGCATAAGCCAGAAAATATCGTTATTGAAATGGCACG
TGAAAATCAGACAACTCAAAAGGGCCAGAAAAATTCGCGAGAGCGTATGAAACGAATCGAAG
AAGGTATCAAAGAATTAGGAAGTCAGATTCTTAAAGAGCATCCTGTTGAAAATACTCAATTG
CAAAATGAAAAGCTCTATCTCTATTATCTCCAAAATGGAAGAGACATGTATGTGGACCAAGA
ATTAGATATTAATCGTTTAAGTGATTATGATGTCGATCACATTGTTCCACAAAGTTTCCTTA
AAGACGATTCAATAGACAATAAGGTCTTAACGCGTTCTGATAAAAATCGTGGTAAATCGGAT
AACGTTCCAAGTGAAGAAGTAGTCAAAAAGATGAAAAACTATTGGAGACAACTTCTAAACGC
CAAGTTAATCACTCAACGTAAGTTTGATAATTTAACGAAAGCTGAACGTGGAGGTTTGAGTG
AACTTGATAAAGCTGGTTTTATCAAACGCCAATTGGTTGAAACTCGCCAAATCACTAAGCAT
GTGGCACAAATTTTGGATAGTCGCATGAATACTAAATACGATGAAAATGATAAACTTATTCG
AGAGGTTAAAGTGATTACCTTAAAATCTAAATTAGTTTCTGACTTCCGAAAAGATTTCCAAT
TCTATAAAGTACGTGAGATTAACAATTACCATCATGCCCATGATGCGTATCTAAATGCCGTC
GTTGGAACTGCTTTGATTAAGAAATATCCAAAACTTGAATCGGAGTTTGTCTATGGTGATTA
TAAAGTTTATGATGTTCGTAAAATGATTGCTAAGTCTGAGCAAGAAATAGGCAAAGCAACCG
CAAAATATTTCTTTTACTCTAATATCATGAACTTCTTCAAAACAGAAATTACACTTGCAAAT
GGAGAGATTCGCAAACGCCCTCTAATCGAAACTAATGGGGAAACTGGAGAAATTGTCTGGGA
TAAAGGGCGAGATTTTGCCACAGTGCGCAAAGTATTGTCCATGCCCCAAGTCAATATTGTCA
AGAAAACAGAAGTACAGACAGGCGGATTCTCCAAGGAGTCAATTTTACCAAAAAGAAATTCG
GACAAGCTTATTGCTCGTAAAAAAGACTGGGATCCAAAAAAATATGGTGGTTTTGATAGTCC
AACGGTAGCTTATTCAGTCCTAGTGGTTGCTAAGGTGGAAAAAGGGAAATCGAAGAAGTTAA
AATCCGTTAAAGAGTTACTAGGGATCACAATTATGGAAAGAAGTTCCTTTGAAAAAAATCCG
ATTGACTTTTTAGAAGCTAAAGGATATAAGGAAGTTAAAAAAGACTTATCATTAAACTACC
TAAATATAGTCTTTTTGAGTTAGAAAACGGTCGTAAACGGATGCTGGCTAGTGCCGGAGAAT
TACAAAAAGGAAATGAGCTGGCTCTGCCAAGCAAATATGTGAATTTTTTATATTTAGCTAGT
CATTATGAAAAGTTGAAGGGTAGTCCAGAAGATAACGAACAAAAACAATTGTTTGTGGAGCA
GCATAAGCATTATTTAGATGAGATTATTGAGCAAATCAGTGAATTTTCTAAGCGTGTTATTT
TAGCAGATGCCAATTTAGATAAAGTTCTTAGTGCATATAACAAACATAGAGACAAACCAATA
CGTGAACAAGCAGAAAATATTATTCATTTATTTACGTTGACGAATCTTGGAGCTCCCGCTGC
TTTTAAATATTTTGATACAACAATTGATCGTAAACGATATACGTCTACAAAAGAAGTTTTAG
ATGCCACTCTTATCCATCAATCCATCACTGGTCTTTATGAAACACGCATTGATTTGAGTCAG
CTAGGAGGTGACTGA
MDKKYSIGLDIGTNSVGWAVITDEYKVPSKKFKVLGNTDRHSIKKNLIGALLFDSGETAEAT
RLKRTARRRYTRRKNRICYLQEIFSNEMAKVDDSFFHRLEESFLVEEDKKHERHPIFGNIVD
EVAYHEKYPTIYHLRKKLVDSTDKADLRLIYLALAHMIKFRGHFLIEGDLNPDNSDVDKLFI
QLVQTYNQLFEENPINASGVDAKAILSARLSKSRRLENLIAQLPGEKKNGLFGNLIALSLGL
TPNFKSNFDLAEDAKLQLSKDTYDDDLDNLLAQIGDQYADLFLAAKNLSDAILLSDILRVNT
EITKAPLSASMIKRYDEHHQDLTLLKALVRQQLPEKYKEIFFDQSKNGYAGYIDGGASQEEF
YKFIKPILEKMDGTEELLVKLNREDLLRKQRTFDNGSIPHQIHLGELHAILRRQEDFYPFLK
DNREKIEKILTFRIPYYVGPLARGNSRFAWMTRKSEETITPWNFEEVVDKGASAQSFIERMT
NFDKNLPNEKVLPKHSLLYEYFTVYNELTKVKYVTEGMRKPAFLSGEQKKAIVDLLFKTNRK
VTVKQLKEDYFKKIECFDSVEISGVEDRFNASLGTYHDLLKIIKDKDFLDNEENEDILEDIV
LTLTLFEDREMIEERLKTYAHLFDDKVMKQLKRRRYTGWGRLSRKLINGIRDKQSGKTILDF
LKSDGFANRNFMQLIHDDSLTFKEDIQKAQVSGQGDSLHEHIANLAGSPAIKKGILQTVKVV
DELVKVMGRHKPENIVIEMARENQTTQKGQKNSRERMKRIEEGIKELGSQILKEHPVENTQL
QNEKLYLYYLQNGRDMYVDQELDINRLSDYDVDHIVPQSFLKDDSIDNKVLTRSDKNRGKSD
NVPSEEVVKKMKNYWRQLLNAKLITQRKFDNLTKAERGGLSELDKAGFIKRQLVETRQITKH
VAQILDSRMNTKYDENDKLIREVKVITLKSKLVSDFRKDFQFYKVREINNYHHAHDAYLNAV
VGTALIKKYPKLESEFVYGDYKVYDVRKMIAKSEQEIGKATAKYFFYSNIMNFFKTEITLAN
GEIRKRPLIETNGETGEIVWDKGRDFATVRKVLSMPQVNIVKKTEVQTGGFSKESILPKRNS
DKLIARKKDWDPKKYGGFDSPTVAYSVLVVAKVEKGKSKKLKSVKELLGITIMERSSFEKNP
IDFLEAKGYKEVKKDLIIKLPKYSLFELENGRKRMLASAGELQKGNELALPSKYVNFLYLAS
HYEKLKGSPEDNEQKQLFVEQHKHYLDEIIEQISEFSKRVILADANLDKVLSAYNKHRDKPI
REQAENIIHLFTLTNLGAPAAFKYFDTTIDRKRYTSTKEVLDATLIHQSITGLYETRIDLSQ
LGGD

(single underline: HNH domain; double underline: RuvC domain)

[0232] In some embodiments, Cas9 refers to Cas9 from: Corynebacterium ulcerans (NCBI Refs: NC_015683.1, NC_017317.1); Corynebacterium diphtheria (NCBI Refs: NC_016782.1, NC_016786.1); Spiroplasma syrphidicola (NCBI Ref: NC_021284.1); Prevotella intermedia (NCBI Ref: NC_017861.1); Spiroplasma taiwanense (NCBI Ref: NC_021846.1); Streptococcus iniae (NCBI Ref: NC_021314.1); Belliella baltica (NCBI Ref: NC_018010.1); Psychroflexus torquisl (NCBI Ref: NC_018721.1); Streptococcus thermophilus (NCBI Ref: YP_820832.1), Listeria innocua (NCBI Ref: NP 472073.1), Campylobacter jejuni (NCBI Ref: YP_002344900.1) or Neisseria meningitidis (NCBI Ref: YP_002342100.1) or to a Cas9 from any other organism.

[0233] It should be appreciated that additional Cas9 proteins (e.g., a nuclease dead Cas9 (dCas9), a Cas9 nickase (nCas9), or a nuclease active Cas9), including variants and homologs thereof, are within the scope of this disclosure. Exemplary Cas9 proteins include, without limitation, those provided below. In some embodiments, the Cas9 protein is a nuclease dead Cas9 (dCas9). In some embodiments, the Cas9 protein is a Cas9 nickase (nCas9). In some embodiments, the Cas9 protein is a nuclease active Cas9.

[0234] In some embodiments, the Cas9 domain is a nuclease-inactive Cas9 domain (dCas9). For example, the dCas9 domain may bind to a duplexed nucleic acid molecule (e.g., via a gRNA molecule) without cleaving either strand of the duplexed nucleic acid molecule. In some embodiments, the nuclease-inactive dCas9 domain comprises a D10X mutation and a H840X mutation of the amino acid sequence set forth herein, or a corresponding mutation in any of the amino acid sequences provided herein, wherein X is any amino acid change. In some embodiments, the nuclease-inactive dCas9 domain comprises a D10A mutation and a H840A mutation of the amino acid sequence set forth herein, or a corresponding mutation in any of the amino acid sequences provided herein. As one example, a nuclease-inactive Cas9 domain comprises the amino acid sequence set forth in Cloning vector pPlatTET-gRNA2 (Accession No. BAV54124).

[0235] The amino acid sequence of an exemplary catalytically inactive Cas9 (dCas9) is as follows:

MDKKYSIGLAIGTNSVGWAVITDEYKVPSKKFKVLGNTDRHSIKKNLIGALLFDSGETAEAT
RLKRTARRRYTRRKNRICYLQEIFSNEMAKVDDSFFHRLEESFLVEEDKKHERHPIFGNIVD
EVAYHEKYPTIYHLRKKLVDSTDKADLRLIYLALAHMIKFRGHFLIEGDLNPDNSDVDKLFI
QLVQTYNQLFEENPINASGVDAKAILSARLSKSRRLENLIAQLPGEKKNGLFGNLIALSLGL
TPNFKSNFDLAEDAKLQLSKDTYDDDLDNLLAQIGDQYADLFLAAKNLSDAILLSDILRVNT
EITKAPLSASMIKRYDEHHQDLTLLKALVRQQLPEKYKEIFFDQSKNGYAGYIDGGASQEEF
YKFIKPILEKMDGTEELLVKLNREDLLRKQRTFDNGSIPHQIHLGELHAILRRQEDFYPFLK
DNREKIEKILTFRIPYYVGPLARGNSRFAWMTRKSEETITPWNFEEVVDKGASAQSFIERMT
NFDKNLPNEKVLPKHSLLYEYFTVYNELTKVKYVTEGMRKPAFLSGEQKKAIVDLLFKTNRK
VTVKQLKEDYFKKIECFDSVEISGVEDRFNASLGTYHDLLKIIKDKDFLDNEENEDILEDIV
LTLTLFEDREMIEERLKTYAHLFDDKVMKQLKRRRYTGWGRLSRKLINGIRDKQSGKTILDF
LKSDGFANRNFMQLIHDDSLTFKEDIQKAQVSGQGDSLHEHIANLAGSPAIKKGILQTVKVV
DELVKVMGRHKPENIVIEMARENQTTQKGQKNSRERMKRIEEGIKELGSQILKEHPVENTQL
QNEKLYLYYLQNGRDMYVDQELDINRLSDYDVDAIVPQSFLKDDSIDNKVLTRSDKNRGKSD
NVPSEEVVKKMKNYWRQLLNAKLITQRKFDNLTKAERGGLSELDKAGFIKRQLVETRQITKH
VAQILDSRMNTKYDENDKLIREVKVITLKSKLVSDFRKDFQFYKVREINNYHHAHDAYLNAV
VGTALIKKYPKLESEFVYGDYKVYDVRKMIAKSEQEIGKATAKYFFYSNIMNFFKTEITLAN
GEIRKRPLIETNGETGEIVWDKGRDFATVRKVLSMPQVNIVKKTEVQTGGFSKESILPKRNS
DKLIARKKDWDPKKYGGFDSPTVAYSVLVVAKVEKGKSKKLKSVKELLGITIMERSSFEKNP
IDFLEAKGYKEVKKDLIIKLPKYSLFELENGRKRMLASAGELQKGNELALPSKYVNFLYLAS
HYEKLKGSPEDNEQKQLFVEQHKHYLDEIIEQISEFSKRVILADANLDKVLSAYNKHRDKPI
REQAENIIHLFTLTNLGAPAAFKYFDTTIDRKRYTSTKEVLDATLIHQSITGLYETRIDLSQ
LGGD.

(see, e.g., Qi et at., “Repurposing CRISPR as an RNA-guided platform for sequence-specific control of gene expression.” Cell. 2013; 152(5):1173-83, the entire contents of which are incorporated herein by reference)

[0236] Additional suitable nuclease-inactive dCas9 domains will be apparent to those of skill in the art based on this disclosure and knowledge in the field, and are within the scope of this disclosure. Such additional exemplary suitable nuclease-inactive Cas9 domains include, but are not limited to, D10A/H840A, D10A/D839A/H840A, and D10A/D839A/H840A/N863A mutant domains (See, e.g., Prashant et al., CAS9 transcriptional activators for target specificity screening and paired nickases for cooperative genome engineering. Nature Biotechnology. 2013; 31(9): 833-838, the entire contents of which are incorporated herein by reference).

[0237] In some embodiments, a Cas9 nuclease has an inactive (e.g., an inactivated) DNA cleavage domain, that is, the Cas9 is a nickase, referred to as an “nCas9” protein (for “nickase” Cas9). A nuclease-inactivated Cas9 protein may interchangeably be referred to as a “dCas9” protein (for nuclease-“dead” Cas9) or catalytically inactive Cas9. Methods for generating a Cas9 protein (or a fragment thereof) having an inactive DNA cleavage domain are known (See, e.g., Jinek et al., Science. 337:816-821(2012); Qi et al., “Repurposing CRISPR as an RNA-Guided Platform for Sequence-Specific Control of Gene Expression” (2013) Cell. 28; 152(5):1173-83, the entire contents of each of which are incorporated herein by reference). For example, the DNA cleavage domain of Cas9 is known to include two subdomains, the HNH nuclease subdomain and the RuvC1 subdomain. The HNH subdomain cleaves the strand complementary to the gRNA, whereas the RuvC1 subdomain cleaves the non-complementary strand. Mutations within these subdomains can silence the nuclease activity of Cas9. For example, the mutations D10A and H840A completely inactivate the nuclease activity of S. pyogenes Cas9 (Jinek et al., Science. 337:816-821(2012); Qi et al., Cell. 28; 152(5):1173-83 (2013)).

[0238] In some embodiments, the dCas9 domain comprises an amino acid sequence that is at least 60%, at least 65%, at least 70%, at least 75%, at least 80%, at least 85%, at least 90%, at least 95%, at least 96%, at least 97%, at least 98%, at least 99%, or at least 99.5% identical to any one of the dCas9 domains provided herein. In some embodiments, the Cas9 domain comprises an amino acid sequences that has 1, 2, 3, 4, 5, 6, 7, 8, 9, 10, 11, 12, 13, 14, 15, 16, 17, 18, 19, 20, 21, 22, 21, 24, 25, 26, 27, 28, 29, 30, 31, 32, 33, 34, 35, 36, 37, 38, 39, 40, 41, 42, 43, 44, 45, 46, 47, 48, 49, 50 or more or more mutations compared to any one of the amino acid sequences set forth herein. In some embodiments, the Cas9 domain comprises an amino acid sequence that has at least 10, at least 15, at least 20, at least 30, at least 40, at least 50, at least 60, at least 70, at least 80, at least 90, at least 100, at least 150, at least 200, at least 250, at least 300, at least 350, at least 400, at least 500, at least 600, at least 700, at least 800, at least 900, at least 1000, at least 1100, or at least 1200 identical contiguous amino acid residues as compared to any one of the amino acid sequences set forth herein.

[0239] In some embodiments, dCas9 corresponds to, or comprises in part or in whole, a Cas9 amino acid sequence having one or more mutations that inactivate the Cas9 nuclease activity.

[0240] For example, in some embodiments, a dCas9 domain comprises D10A and an H840A mutation or corresponding mutations in another Cas9.

[0241] In some embodiments, the dCas9 comprises the amino acid sequence of dCas9 (D10A and H840A):

MDKKYSIGLAIGTNSVGWAVITDEYKVPSKKFKVLGNTDRHSIKKNLIGALLFDSGETAEAT
RLKRTARRRYTRRKNRICYLQEIFSNEMAKVDDSFFHRLEESFLVEEDKKHERHPIFGNIVD
EVAYHEKYPTIYHLRKKLVDSTDKADLRLIYLALAHMIKFRGHFLIEGDLNPDNSDVDKLFI
QLVQTYNQLFEENPINASGVDAKAILSARLSKSRRLENLIAQLPGEKKNGLFGNLIALSLGL
TPNFKSNFDLAEDAKLQLSKDTYDDDLDNLLAQIGDQYADLFLAAKNLSDAILLSDILRVNT
EITKAPLSASMIKRYDEHHQDLTLLKALVRQQLPEKYKEIFFDQSKNGYAGYIDGGASQEEF
YKFIKPILEKMDGTEELLVKLNREDLLRKQRTFDNGSIPHQIHLGELHAILRRQEDFYPFLK
DNREKIEKILTFRIPYYVGPLARGNSRFAWMTRKSEETITPWNFEEVVDKGASAQSFIERMT
NFDKNLPNEKVLPKHSLLYEYFTVYNELTKVKYVTEGMRKPAFLSGEQKKAIVDLLFKTNRK
VTVKQLKEDYFKKIECFDSVEISGVEDRFNASLGTYHDLLKIIKDKDFLDNEENEDILEDIV
LTLTLFEDREMIEERLKTYAHLFDDKVMKQLKRRRYTGWGRLSRKLINGIRDKQSGKTILDF
LKSDGFANRNFMQLIHDDSLTFKEDIQKAQVSGQGDSLHEHIANLAGSPAIKKGILQTVKVV
DELVKVMGRHKPENIVIEMARENQTTQKGQKNSRERMKRIEEGIKELGSQILKEHPVENTQL
QNEKLYLYYLQNGRDMYVDQELDINRLSDYDVDAIVPQSFLKDDSIDNKVLTRSDKNRGKSD
NVPSEEVVKKMKNYWRQLLNAKLITQRKFDNLTKAERGGLSELDKAGFIKRQLVETRQITKH
VAQILDSRMNTKYDENDKLIREVKVITLKSKLVSDFRKDFQFYKVREINNYHHAHDAYLNAV
VGTALIKKYPKLESEFVYGDYKVYDVRKMIAKSEQEIGKATAKYFFYSNIMNFFKTEITLAN
GEIRKRPLIETNGETGEIVWDKGRDFATVRKVLSMPQVNIVKKTEVQTGGFSKESILPKRNS
DKLIARKKDWDPKKYGGFDSPTVAYSVLVVAKVEKGKSKKLKSVKELLGITIMERSSFEKNP
IDFLEAKGYKEVKKDLIIKLPKYSLFELENGRKRMLASAGELQKGNELALPSKYVNFLYLAS
HYEKLKGSPEDNEQKQLFVEQHKHYLDEIIEQISEFSKRVILADANLDKVLSAYNKHRDKPI
REQAENIIHLFTLTNLGAPAAFKYFDTTIDRKRYTSTKEVLDATLIHQSITGLYETRIDLSQ
LGGD.

(single underline: HNH domain; double underline: RuvC domain)

[0242] In some embodiments, the Cas9 domain comprises a D10A mutation, while the residue at position 840 remains a histidine in the amino acid sequence provided above, or at corresponding positions in any of the amino acid sequences provided herein.

[0243] In other embodiments, dCas9 variants having mutations other than D10A and H840A are provided, which, e.g., result in nuclease inactivated Cas9 (dCas9). Such mutations, by way of example, include other amino acid substitutions at D10 and H840, or other substitutions within the nuclease domains of Cas9 (e.g., substitutions in the HNH nuclease subdomain and/or the RuvC1 subdomain). In some embodiments, variants or homologues of dCas9 are provided which are at least about 70% identical, at least about 80% identical, at least about 90% identical, at least about 95% identical, at least about 98% identical, at least about 99% identical, at least about 99.5% identical, or at least about 99.9% identical. In some embodiments, variants of dCas9 are provided having amino acid sequences which are shorter, or longer, by about 5 amino acids, by about 10 amino acids, by about 15 amino acids, by about 20 amino acids, by about 25 amino acids, by about 30 amino acids, by about 40 amino acids, by about 50 amino acids, by about 75 amino acids, by about 100 amino acids or more.

[0244] In some embodiments, the Cas9 domain is a Cas9 nickase. The Cas9 nickase may be a Cas9 protein that is capable of cleaving only one strand of a duplexed nucleic acid molecule (e.g., a duplexed DNA molecule). In some embodiments the Cas9 nickase cleaves the target strand of a duplexed nucleic acid molecule, meaning that the Cas9 nickase cleaves the strand that is base paired to (complementary to) a gRNA (e.g., an sgRNA) that is bound to the Cas9. In some embodiments, a Cas9 nickase comprises a D10A mutation and has a histidine at position 840. In some embodiments the Cas9 nickase cleaves the non-target, non-base-edited strand of a duplexed nucleic acid molecule, meaning that the Cas9 nickase cleaves the strand that is not base paired to a gRNA (e.g., an sgRNA) that is bound to the Cas9. In some embodiments, a Cas9 nickase comprises an H840A mutation and has an aspartic acid residue at position 10, or a corresponding mutation. In some embodiments the Cas9 nickase comprises an amino acid sequence that is at least 60%, at least 65%, at least 70%, at least 75%, at least 80%, at least 85%, at least 90%, at least 95%, at least 96%, at least 97%, at least 98%, at least 99%, or at least 99.5% identical to any one of the Cas9 nickases provided herein. Additional suitable Cas9 nickases will be apparent to those of skill in the art based on this disclosure and knowledge in the field, and are within the scope of this disclosure.

[0245] The amino acid sequence of an exemplary catalytically Cas9 nickase (nCas9) is as follows:

MDKKYSIGLAIGTNSVGWAVITDEYKVPSKKFKVLGNTDRHSIKKNLIGALLFDSGETAEAT
RLKRTARRRYTRRKNRICYLQEIFSNEMAKVDDSFFHRLEESFLVEEDKKHERHPIFGNIVD
EVAYHEKYPTIYHLRKKLVDSTDKADLRLIYLALAHMIKFRGHFLIEGDLNPDNSDVDKLFI
QLVQTYNQLFEENPINASGVDAKAILSARLSKSRRLENLIAQLPGEKKNGLFGNLIALSLGL
TPNFKSNFDLAEDAKLQLSKDTYDDDLDNLLAQIGDQYADLFLAAKNLSDAILLSDILRVNT
EITKAPLSASMIKRYDEHHQDLTLLKALVRQQLPEKYKEIFFDQSKNGYAGYIDGGASQEEF
YKFIKPILEKMDGTEELLVKLNREDLLRKQRTFDNGSIPHQIHLGELHAILRRQEDFYPFLK
DNREKIEKILTFRIPYYVGPLARGNSRFAWMTRKSEETITPWNFEEVVDKGASAQSFIERMT
NFDKNLPNEKVLPKHSLLYEYFTVYNELTKVKYVTEGMRKPAFLSGEQKKAIVDLLFKTNRK
VTVKQLKEDYFKKIECFDSVEISGVEDRFNASLGTYHDLLKIIKDKDFLDNEENEDILEDIV
LTLTLFEDREMIEERLKTYAHLFDDKVMKQLKRRRYTGWGRLSRKLINGIRDKQSGKTILDF
LKSDGFANRNFMQLIHDDSLTFKEDIQKAQVSGQGDSLHEHIANLAGSPAIKKGILQTVKVV
DELVKVMGRHKPENIVIEMARENQTTQKGQKNSRERMKRIEEGIKELGSQILKEHPVENTQL
QNEKLYLYYLQNGRDMYVDQELDINRLSDYDVDHIVPQSFLKDDSIDNKVLTRSDKNRGKSD
NVPSEEVVKKMKNYWRQLLNAKLITQRKFDNLTKAERGGLSELDKAGFIKRQLVETRQITKH
VAQILDSRMNTKYDENDKLIREVKVITLKSKLVSDFRKDFQFYKVREINNYHHAHDAYLNAV
VGTALIKKYPKLESEFVYGDYKVYDVRKMIAKSEQEIGKATAKYFFYSNIMNFFKTEITLAN
GEIRKRPLIETNGETGEIVWDKGRDFATVRKVLSMPQVNIVKKTEVQTGGFSKESILPKRNS
DKLIARKKDWDPKKYGGFDSPTVAYSVLVVAKVEKGKSKKLKSVKELLGITIMERSSFEKNP
IDFLEAKGYKEVKKDLIIKLPKYSLFELENGRKRMLASAGELQKGNELALPSKYVNFLYLAS
HYEKLKGSPEDNEQKQLFVEQHKHYLDEIIEQISEFSKRVILADANLDKVLSAYNKHRDKPI
REQAENIIHLFTLTNLGAPAAFKYFDTTIDRKRYTSTKEVLDATLIHQSITGLYETRIDLSQ
LGGD

[0246] In some embodiments, Cas9 refers to a Cas9 from archaea (e.g., nanoarchaea), which constitute a domain and kingdom of single-celled prokaryotic microbes. In some embodiments, the nucleic acid programmable DNA binding protein refers to CasX or CasY, which have been described in, for example, Burstein et al., “New CRISPR-Cas systems from uncultivated microbes.” Cell Res. 2017 Feb 21. doi: 10.1038/cr.2017.21, the entire contents of which is hereby incorporated by reference. Using genome-resolved metagenomics, a number of CRISPR-Cas systems were identified, including the first reported Cas9 in the archaeal domain of life. This divergent Cas9 protein was found in little-studied nanoarchaea as part of an active CRISPR-Cas system. In bacteria, two previously unknown systems were discovered, CRISPR-CasX and CRISPR-CasY, which are among the most compact systems yet discovered. In some embodiments, in a base editor system described herein Cas9 is replaced by CasX, or a variant of CasX. In some embodiments, in a base editor system described herein Cas9 is replaced by CasY, or a variant of CasY. It should be appreciated that other RNA-guided DNA binding proteins may be used as a nucleic acid programmable DNA binding protein (napDNAbp), and are within the scope of this disclosure.

[0247] In some embodiments, the nucleic acid programmable DNA binding protein (napDNAbp) of any of the fusion proteins provided herein may be a CasX or CasY protein. In some embodiments, the napDNAbp is a CasX protein. In some embodiments, the napDNAbp is a CasY protein. In some embodiments, the napDNAbp comprises an amino acid sequence that is at least 85%, at least 90%, at least 91%, at least 92%, at least 93%, at least 94%, at least 95%, at least 96%, at least 97%, at least 98%, at least 99%, or at ease 99.5% identical to a naturally-occurring CasX or CasY protein. In some embodiments, the programmable nucleotide binding protein is a naturally-occurring CasX or CasY protein. In some embodiments, the programmable nucleotide binding protein comprises an amino acid sequence that is at least 85%, at least 90%, at least 91%, at least 92%, at least 93%, at least 94%, at least 95%, at least 96%, at least 97%, at least 98%, at least 99%, or at ease 99.5% identical to any CasX or CasY protein described herein. It should be appreciated that CasX and CasY from other bacterial species may also be used in accordance with the present disclosure.

[0248] An exemplary CasX ((uniprot.org/uniprot/F0NN87; uniprot.org/uniprot/F0NH53) tr|F0NN87|F0NN87_SULIHCRISPR-associatedCasx protein OS=Sulfolobus islandicus (strain HVE10/4) GN=SiH_0402 PE=4 SV=1) amino acid sequence is as follows:

MEVPLYNIFGDNYIIQVATEAENSTIYNNKVEIDDEELRNVLNLAYKIA
KNNEDAAAERRGKAKKKKGEEGETTTSNIILPLSGNDKNPWTETLKCYN
FPTTVALSEVFKNFSQVKECEEVSAPSFVKPEFYEFGRSPGMVERTRRV
KLEVEPHYLIIAAAGWVLTRLGKAKVSEGDYVGVNVFTPTRGILYSLIQ
NVNGIVPGIKPETAFGLWIARKVVSSVTNPNVSVVRIYTISDAVGQNPT
TINGGFSIDLTKLLEKRYLLSERLEAIARNALSISSNMRERYIVLANYI
YEYLTGSKRLEDLLYFANRDLIMNLNSDDGKVRDLKLISAYVNGELIRG
EG.

[0249] An exemplary CasX (>tr|F0NH53|F0NH53_SULIR CRISPR associated protein, Casx OS=Sulfolobus islandicus (strain REY15A) GN=SiRe_0771 PE=4 SV=1) amino acid sequence is as follows:

MEVPLYNIFGDNYIIQVATEAENSTIYNNKVEIDDEELRNVLNLAYKIA
KNNEDAAAERRGKAKKKKGEEGETTTSNIILPLSGNDKNPWTETLKCYN
FPTTVALSEVFKNFSQVKECEEVSAPSFVKPEFYKFGRSPGMVERTRRV
KLEVEPHYLIMAAAGWVLTRLGKAKVSEGDYVGVNVFTPTRGILYSLIQ
NVNGIVPGIKPETAFGLWIARKVVSSVTNPNVSVVSIYTISDAVGQNPT
TINGGFSIDLTKLLEKRDLLSERLEAIARNALSISSNMRERYIVLANYI
YEYLTGSKRLEDLLYFANRDLIMNLNSDDGKVRDLKLISAYVNGELIRG
EG.
Deltaproteobacteria CasX
MEKRINKIRKKLSADNATKPVSRSGPMKTLLVRVMTDDLKKRLEKRRKK
PEVMPQVISNNAANNLRMLLDDYTKMKEAILQVYWQEFKDDHVGLMCKF
AQPASKKIDQNKLKPEMDEKGNLTTAGFACSQCGQPLFVYKLEQVSEKG
KAYTNYFGRCNVAEHEKLILLAQLKPVKDSDEAVTYSLGKFGQRALDFY
SIHVTKESTHPVKPLAQIAGNRYASGPVGKALSDACMGTIASFLSKYQD
IIIEHQKVVKGNQKRLESLRELAGKENLEYPSVTLPPQPHTKEGVDfAY
NEVIARVRMWVNLNLWQKLKLSRDDAKPLLRLKGFPSFPVVERRENEVD
WWNTINEVKKLIDAKRDMGRVFWSGVTAEKRNTILEGYNYLPNENDHKK
REGSLENPKKPAKRQFGDLLLYLEKKYAGDWGKVFDEAWERIDKKIAGL
TSHIEREEARNAEDAQSKAVLTDWLRAKASFVLERLKEMDEKEFYACEI
QLQKWYGDLRGNPFAVEAENRVVDISGFSIGSDGHSIQYRNLLAWKYLE
NGKREFYLLMNYGKKGRIRFTDGTDIKKSGKWQGLLYGGGKAKVIDLTF
DPDDEQLIILPLAFGTRQGREFIWNDLLSLETGLIKLANGRVIEKTIYN
KKIGRDEPALFVALTFERREVVDPSNIKPVNLIGVARGENIPAVIALTD
PEGCPLPEFKDSSGGPTDILRIGEGYKEKQRAIQAAKEVEQRRAGGYSR
KFASKSRNLADDMVRNSARDLFYHAVTHDAVLVFANLSRGFGRQGKRTF
MTERQYTKMEDWLTAKLAYEGLTSKTYLSKTLAQYTSKTCSNCGFTITY
ADMDVMLVRLKKTSDGWATTLNNKELKAEYQITYYNRYKRQTVEKELSA
ELDRLSEESGNNDISKWTKGRRDEALFLLKKRFSHRPVQEQFVCLDCGH
EVHAAEQAALNIARSWLFLNSNSTEFKSYKSGKQPFVGAWQAFYKRRLK
EVWKPNA

[0250] An exemplary CasY ((ncbi.nlm.nih.gov/protein/APG80656.1) >APG80656.1 CRISPR-associated protein CasY [uncultured Parcubacteria group bacterium]) amino acid sequence is as follows:

MSKRHPRISGVKGYRLHAQRLEYTGKSGAMRTIKYPLYSSPSGGRTVPR
EIVSAINDDYVGLYGLSNFDDLYNAEKRNEEKVYSVLDFWYDCVQYGAV
FSYTAPGLLKNVAEVRGGSYELTKTLKGSHLYDELQIDKVIKFLNKKEI
SRANGSLDKLKKDIIDCFKAEYRERHKDQCNKLADDIKNAKKDAGASLG
ERQKKLFRDFFGISEQSENDKPSFTNPLNLTCCLLPFDTVNNNRNRGEV
LFNKLKEYAQKLDKNEGSLEMWEYIGIGNSGTAFSNFLGEGFLGRLREN
KITELKKAMMDITDAWRGQEQEEELEKRLRILAALTIKLREPKFDNHWG
GYRSDINGKLSSWLQNYINQTVKIKEDLKGHKKDLKKAKEMINRFGESD
TKEEAVVSSLLESIEKIVPDDSADDEKPDIPAIAIYRRFLSDGRLTLNR
FVQREDVQEALIKERLEAEKKKKPKKRKKKSDAEDEKETIDFKELFPHL
AKPLKLVPNFYGDSKRELYKKYKNAAIYTDALWKAVEKIYKSAFSSSLK
NSFFDTDFDKDFFIKRLQKIFSVYRRFNTDKWKPIVKNSFAPYCDIVSL
AENEVLYKPKQSRSRKSAAIDKNRVRLPSTENIAKAGIALARELSVAGF
DWKDLLKKEEHEEYIDLIELHKTALALLLAVTETQLDISALDFVENGTV
KDFMKTRDGNLVLEGRFLEMFSQSIVFSELRGLAGLMSRKEFITRSAIQ
TMNGKQAELLYIPHEFQSAKITTPKEMSRAFLDLAPAEFATSLEPESLS
EKSLLKLKQMRYYPHYFGYELTRTGQGIDGGVAENALRLEKSPVKKREI
KCKQYKTLGRGQNKIVLYVRSSYYQTQFLEWFLHRPKNVQTDVAVSGSF
LIDEKKVKTRWNYDALTVALEPVSGSERVFVSQPFTIFPEKSAEEEGQR
YLGIDIGEYGIAYTALEITGDSAKILDQNFISDPQLKTLREEVKGLKLD
QRRGTFAMPSTKIARIRESLVHSLRNRIHHLALKHKAKIVYELEVSRFE
EGKQKIKKVYATLKKADVYSEIDADKNLQTTVWGKLAVASEISASYTSQ
FCGACKKLWRAEMQVDETITTQELIGTVRVIKGGTLIDAIKDFMRPPIF
DENDTPFPKYRDFCDKHHISKKMRGNSCLFICPFCRANADADIQASQTI
ALLRYVKEEKKVEDYFERFRKLKNIKVLGQMKKI.

[0251] The Cas9 nuclease has two functional endonuclease domains: RuvC and HNH. Cas9 undergoes a conformational change upon target binding that positions the nuclease domains to cleave opposite strands of the target DNA. The end result of Cas9-mediated DNA cleavage is a double-strand break (DSB) within the target DNA (˜3-4 nucleotides upstream of the PAM sequence). The resulting DSB is then repaired by one of two general repair pathways: (1) the efficient but error-prone non-homologous end joining (NHEJ) pathway; or (2) the less efficient but high-fidelity homology directed repair (HDR) pathway.

[0252] The “efficiency” of non-homologous end joining (NHEJ) and/or homology directed repair (HDR) can be calculated by any convenient method. For example, in some embodiments, efficiency can be expressed in terms of percentage of successful HDR. For example, a surveyor nuclease assay can be used to generate cleavage products and the ratio of products to substrate can be used to calculate the percentage. For example, a surveyor nuclease enzyme can be used that directly cleaves DNA containing a newly integrated restriction sequence as the result of successful HDR. More cleaved substrate indicates a greater percent HDR (a greater efficiency of HDR). As an illustrative example, a fraction (percentage) of HDR can be calculated using the following equation [(cleavage products)/(substrate plus cleavage products)] (e.g., (b+c)/(a+b+c), where “a” is the band intensity of DNA substrate and “b” and “c” are the cleavage products).

[0253] In some embodiments, efficiency can be expressed in terms of percentage of successful NHEJ. For example, a T7 endonuclease I assay can be used to generate cleavage products and the ratio of products to substrate can be used to calculate the percentage NHEJ. T7 endonuclease I cleaves mismatched heteroduplex DNA which arises from hybridization of wild-type and mutant DNA strands (NHEJ generates small random insertions or deletions (indels) at the site of the original break). More cleavage indicates a greater percent NHEJ (a greater efficiency of NHEJ). As an illustrative example, a fraction (percentage) of NHEJ can be calculated using the following equation: (1−(1−(b+c)/(a+b+c))^{1/2})×100, where “a” is the band intensity of DNA substrate and “b” and “c” are the cleavage products (Ran et. al., Cell. 2013 Sep. 12; 154(6):1380-9; and Ran et al., Nat Protoc. 2013 November; 8(11): 2281-2308).

[0254] The NHEJ repair pathway is the most active repair mechanism, and it frequently causes small nucleotide insertions or deletions (indels) at the DSB site. The randomness of NHEJ-mediated DSB repair has important practical implications, because a population of cells expressing Cas9 and a gRNA or a guide polynucleotide can result in a diverse array of mutations. In some embodiments, NHEJ gives rise to small indels in the target DNA that result in amino acid deletions, insertions, or frameshift mutations leading to premature stop codons within the open reading frame (ORF) of the targeted gene. The ideal end result is a loss-of-function mutation within the targeted gene.

[0255] While NHEJ-mediated DSB repair often disrupts the open reading frame of the gene, homology directed repair (HDR) can be used to generate specific nucleotide changes ranging from a single nucleotide change to large insertions like the addition of a fluorophore or tag. In order to utilize HDR for gene editing, a DNA repair template containing the desired sequence can be delivered into the cell type of interest with the gRNA(s) and Cas9 or Cas9 nickase. The repair template can contain the desired edit as well as additional homologous sequence immediately upstream and downstream of the target (termed left & right homology arms). The length of each homology arm can be dependent on the size of the change being introduced, with larger insertions requiring longer homology arms. The repair template can be a single-stranded oligonucleotide, double-stranded oligonucleotide, or a double-stranded

[0256] DNA plasmid. The efficiency of HDR is generally low (<10% of modified alleles) even in cells that express Cas9, gRNA and an exogenous repair template. The efficiency of HDR can be enhanced by synchronizing the cells, since HDR takes place during the S and G2 phases of the cell cycle. Chemically or genetically inhibiting genes involved in NHEJ can also increase HDR frequency.

[0257] In some embodiments, Cas9 is a modified Cas9. A given gRNA targeting sequence can have additional sites throughout the genome where partial homology exists. These sites are called off-targets and need to be considered when designing a gRNA. In addition to optimizing gRNA design, CRISPR specificity can also be increased through modifications to Cas9. Cas9 generates double-strand breaks (DSBs) through the combined activity of two nuclease domains, RuvC and HNH. Cas9 nickase, a D10A mutant of SpCas9, retains one nuclease domain and generates a DNA nick rather than a DSB. The nickase system can also be combined with HDR-mediated gene editing for specific gene edits.

[0258] In some embodiments, Cas9 is a variant Cas9 protein. A variant Cas9 polypeptide has an amino acid sequence that is different by one amino acid (e.g., has a deletion, insertion, substitution, fusion) when compared to the amino acid sequence of a wild-type Cas9 protein. In some instances, the variant Cas9 polypeptide has an amino acid change (e.g., deletion, insertion, or substitution) that reduces the nuclease activity of the Cas9 polypeptide. For example, in some instances, the variant Cas9 polypeptide has less than 50%, less than 40%, less than 30%, less than 20%, less than 10%, less than 5%, or less than 1% of the nuclease activity of the corresponding wild-type Cas9 protein. In some embodiments, the variant Cas9 protein has no substantial nuclease activity. When a subject Cas9 protein is a variant Cas9 protein that has no substantial nuclease activity, it can be referred to as “dCas9.”

[0259] In some embodiments, a variant Cas9 protein has reduced nuclease activity. For example, a variant Cas9 protein exhibits less than about 20%, less than about 15%, less than about 10%, less than about 5%, less than about 1%, or less than about 0.1%, of the endonuclease activity of a wild-type Cas9 protein, e.g., a wild-type Cas9 protein.

[0260] In some embodiments, a variant Cas9 protein can cleave the complementary strand of a guide target sequence but has reduced ability to cleave the non-complementary strand of a double stranded guide target sequence. For example, the variant Cas9 protein can have a mutation (amino acid substitution) that reduces the function of the RuvC domain. As a non-limiting example, in some embodiments, a variant Cas9 protein has a D10A (aspartate to alanine at amino acid position 10) and can therefore cleave the complementary strand of a double stranded guide target sequence but has reduced ability to cleave the non-complementary strand of a double stranded guide target sequence (thus resulting in a single strand break (SSB) instead of a double strand break (DSB) when the variant Cas9 protein cleaves a double stranded target nucleic acid) (see, for example, Jinek et al., Science. 2012 Aug. 17; 337(6096):816-21).

[0261] In some embodiments, a variant Cas9 protein can cleave the non-complementary strand of a double stranded guide target sequence but has reduced ability to cleave the complementary strand of the guide target sequence. For example, the variant Cas9 protein can have a mutation (amino acid substitution) that reduces the function of the HNH domain (RuvC/HNH/RuvC domain motifs). As a non-limiting example, in some embodiments, the variant Cas9 protein has an H840A (histidine to alanine at amino acid position 840) mutation and can therefore cleave the non-complementary strand of the guide target sequence but has reduced ability to cleave the complementary strand of the guide target sequence (thus resulting in a SSB instead of a DSB when the variant Cas9 protein cleaves a double stranded guide target sequence). Such a Cas9 protein has a reduced ability to cleave a guide target sequence (e.g., a single stranded guide target sequence) but retains the ability to bind a guide target sequence (e.g., a single stranded guide target sequence).

[0262] In some embodiments, a variant Cas9 protein has a reduced ability to cleave both the complementary and the non-complementary strands of a double stranded target DNA. As a non-limiting example, in some embodiments, the variant Cas9 protein harbors both the D10A and the H840A mutations such that the polypeptide has a reduced ability to cleave both the complementary and the non-complementary strands of a double stranded target DNA. Such a Cas9 protein has a reduced ability to cleave a target DNA (e.g., a single stranded target DNA) but retains the ability to bind a target DNA (e.g., a single stranded target DNA).

[0263] As another non-limiting example, in some embodiments, the variant Cas9 protein harbors W476A and W1126A mutations such that the polypeptide has a reduced ability to cleave a target DNA. Such a Cas9 protein has a reduced ability to cleave a target DNA (e.g., a single stranded target DNA) but retains the ability to bind a target DNA (e.g., a single stranded target DNA).

[0264] As another non-limiting example, in some embodiments, the variant Cas9 protein harbors P475A, W476A, N477A, D1125A, W1126A, and D1127A mutations such that the polypeptide has a reduced ability to cleave a target DNA. Such a Cas9 protein has a reduced ability to cleave a target DNA (e.g., a single stranded target DNA) but retains the ability to bind a target DNA (e.g., a single stranded target DNA).

[0265] As another non-limiting example, in some embodiments, the variant Cas9 protein harbors H840A, W476A, and W1126A, mutations such that the polypeptide has a reduced ability to cleave a target DNA. Such a Cas9 protein has a reduced ability to cleave a target DNA (e.g., a single stranded target DNA) but retains the ability to bind a target DNA (e.g., a single stranded target DNA). As another non-limiting example, in some embodiments, the variant Cas9 protein harbors H840A, D10A, W476A, and W1126A, mutations such that the polypeptide has a reduced ability to cleave a target DNA. Such a Cas9 protein has a reduced ability to cleave a target DNA (e.g., a single stranded target DNA) but retains the ability to bind a target DNA (e.g., a single stranded target DNA). In some embodiments, the variant Cas9 has restored catalytic His residue at position 840 in the Cas9 HNH domain (A840H).

[0266] As another non-limiting example, in some embodiments, the variant Cas9 protein harbors, H840A, P475A, W476A, N477A, D1125A, W1126A, and D1127A mutations such that the polypeptide has a reduced ability to cleave a target DNA. Such a Cas9 protein has a reduced ability to cleave a target DNA (e.g., a single stranded target DNA) but retains the ability to bind a target DNA (e.g., a single stranded target DNA). As another non-limiting example, in some embodiments, the variant Cas9 protein harbors D10A, H840A, P475A, W476A, N477A, D1125A, W1126A, and D1127A mutations such that the polypeptide has a reduced ability to cleave a target DNA. Such a Cas9 protein has a reduced ability to cleave a target DNA (e.g., a single stranded target DNA) but retains the ability to bind a target DNA (e.g., a single stranded target DNA). In some embodiments, when a variant Cas9 protein harbors W476A and W1126A mutations or when the variant Cas9 protein harbors P475A, W476A, N477A, D1125A, W1126A, and D1127A mutations, the variant Cas9 protein does not bind efficiently to a PAM sequence. Thus, in some such embodiments, when such a variant Cas9 protein is used in a method of binding, the method does not require a PAM sequence. In other words, in some embodiments, when such a variant Cas9 protein is used in a method of binding, the method can include a guide RNA, but the method can be performed in the absence of a PAM sequence (and the specificity of binding is therefore provided by the targeting segment of the guide RNA). Other residues can be mutated to achieve the above effects (i.e., inactivate one or the other nuclease portions). As non-limiting examples, residues D10, G12, G17, E762, H840, N854, N863, H982, H983, A984, D986, and/or A987 can be altered (i.e., substituted). Also, mutations other than alanine substitutions are suitable.

[0267] In some embodiments, a variant Cas9 protein that has reduced catalytic activity (e.g., when a Cas9 protein has a D10, G12, G17, E762, H840, N854, N863, H982, H983, A984, D986, and/or a A987 mutation, e.g., D10A, G12A, G17A, E762A, H840A, N854A, N863A, H982A, H983A, A984A, and/or D986A), the variant Cas9 protein can still bind to target DNA in a site-specific manner (because it is still guided to a target DNA sequence by a guide RNA) as long as it retains the ability to interact with the guide RNA.

[0268] In some embodiments, the variant Cas protein can be spCas9, spCas9-VRQR, spCas9-VRER, xCas9 (sp), saCas9, saCas9-KKH, spCas9-MQKSER, spCas9-LRKIQK, or spCas9-LRVSQL.

[0269] In some embodiments, a modified SpCas9 including amino acid substitutions D1135M, S1136Q, G1218K, E1219F, A1322R, D1332A, R1335E, and T1337R (SpCas9-MQKFRAER) and having specificity for the altered PAM 5′-NGC-3′ was used.

[0270] Alternatives to S. pyogenes Cas9 can include RNA-guided endonucleases from the Cpf1 family that display cleavage activity in mammalian cells. CRISPR from Prevotella and Francisella 1 (CRISPR/Cpf1) is a DNA-editing technology analogous to the CRISPR/Cas9 system. Cpf1 is an RNA-guided endonuclease of a class II CRISPR/Cas system. This acquired immune mechanism is found in Prevotella and Francisella bacteria. Cpf1 genes are associated with the CRISPR locus, coding for an endonuclease that use a guide RNA to find and cleave viral DNA. Cpf1 is a smaller and simpler endonuclease than Cas9, overcoming some of the CRISPR/Cas9 system limitations. Unlike Cas9 nucleases, the result of Cpf1-mediated DNA cleavage is a double-strand break with a short 3′ overhang. Cpf1's staggered cleavage pattern can open up the possibility of directional gene transfer, analogous to traditional restriction enzyme cloning, which can increase the efficiency of gene editing. Like the Cas9 variants and orthologues described above, Cpf1 can also expand the number of sites that can be targeted by CRISPR to AT-rich regions or AT-rich genomes that lack the NGG PAM sites favored by SpCas9. The Cpf1 locus contains a mixed alpha/beta domain, a RuvC-I followed by a helical region, a RuvC-II and a zinc finger-like domain. The Cpf1protein has a RuvC-like endonuclease domain that is similar to the RuvC domain of Cas9. Furthermore, Cpf1 does not have an HNH endonuclease domain, and the N-terminal of Cpf1does not have the alpha-helical recognition lobe of Cas9. Cpf1 CRISPR-Cas domain architecture shows that Cpf1 is functionally unique, being classified as Class 2, type V CRISPR system. The Cpf1 loci encode Cas1, Cas2 and Cas4 proteins that aremore similar to types I and III than type II systems. Functional Cpf1 does not require the trans-activating CRISPR RNA (tracrRNA), therefore, only CRISPR (crRNA) is required. This benefits genome editing because Cpf1 is not only smaller than Cas9, but also it has a smaller sgRNA molecule (approximately half as many nucleotides as Cas9). The Cpf1-crRNA complex cleaves target DNA or RNA by identification of a protospacer adjacent motif 5′-YTN-3′ or 5′-TTN-3′ in contrast to the G-rich PAM targeted by Cas9. After identification of PAM, Cpf1 introduces a sticky-end-like DNA double-stranded break having an overhang of 4 or 5 nucleotides.

[0271] In some embodiments, the Cas9 is a Cas9 variant having specificity for an altered PAM sequence. In some embodiments, the Additional Cas9 variants and PAM sequences are described in Miller, S. M., et al. Continuous evolution of SpCas9 variants compatible with non-G PAMs, Nat. Biotechnol. (2020), the entirety of which is incorporated herein by reference. in some embodiments, a Cas9 variate have no specific PAM requirements. In some embodiments, a Cas9 variant, e.g. a SpCas9 variant has specificity for a NRNH PAM, wherein R is A or G and H is A, C, or T. In some embodiments, the SpCas9 variant has specificity for a PAM sequence AAA, TAA, CAA, GAA, TAT, GAT, or CAC. In some embodiments, the SpCas9 variant comprises an amino acid substitution at position 1114, 1134, 1135, 1137, 1139, 1151, 1180, 1188, 1211, 1218, 1219, 1221, 1249, 1256, 1264, 1290, 1318, 1317, 1320, 1321, 1323, 1332, 1333, 1335, 1337, or 1339 as numbered in SEQ ID NO: 1 or a corresponding position thereof. In some embodiments, the SpCas9 variant comprises an amino acid substitution at position 1114, 1135, 1218, 1219, 1221, 1249, 1320, 1321, 1323, 1332, 1333, 1335, or 1337 as numbered in SEQ ID NO: 1 or a corresponding position thereof. In some embodiments, the SpCas9 variant comprises an amino acid substitution at position 1114, 1134, 1135, 1137, 1139, 1151, 1180, 1188, 1211, 1219, 1221, 1256, 1264, 1290, 1318, 1317, 1320, 1323, 1333 as numbered in SEQ ID NO: 1 or a corresponding position thereof. In some embodiments, the SpCas9 variant comprises an amino acid substitution at position 1114, 1131, 1135, 1150, 1156, 1180, 1191, 1218, 1219, 1221, 1227, 1249, 1253, 1286, 1293, 1320, 1321, 1332, 1335, 1339 as numbered in SEQ ID NO: 1 or a corresponding position thereof. In some embodiments, the SpCas9 variant comprises an amino acid substitution at position 1114, 1127, 1135, 1180, 1207, 1219, 1234, 1286, 1301, 1332, 1335, 1337, 1338, 1349 as numbered in SEQ ID NO: 1 or a corresponding position thereof. Exemplary amino acid substitutions and PAM specificity of SpCas9 variants are shown in Tables 1A-1D.

TABLE 1A

| | SpCas9 amino acid position | | | | | | | | | | | | |
|---|---|---|---|---|---|---|---|---|---|---|---|---|---|
| | 1114 | 1135 | 1218 | 1219 | 1221 | 1249 | 1320 | 1321 | 1323 | 1332 | 1333 | 1335 | 1337 |
| SpCas9 | R | D | G | E | Q | P | A | P | A | D | R | R | T |
| AAA | | N | | V | H | | | | | | G | | |
| AAA | | N | | V | H | | | | | | G | | |
| AAA | | | | V | | | | | | | G | | |
| TAA | G | N | | V | | | | | | | I | | |
| TAA | | N | | V | | | | | | | I | | A |
| TAA | G | N | | V | | | | | | | I | | A |
| CAA | | | | V | | | | | | | K | | |
| CAA | | N | | V | | | | | | | K | | |
| CAA | | N | | V | | | | | | | K | | |
| GAA | | | | V | H | | V | | | | K | | |
| GAA | | N | | V | | | V | | | | K | | |
| GAA | | | | V | H | | V | | | | K | | |
| TAT | | | S | V | H | S | | S | | | | L | |
| TAT | | | S | V | H | S | | S | | | | L | |
| TAT | | | S | V | H | S | | S | | | | L | |
| GAT | | | | V | | | | | | | I | | |
| GAT | | | | V | | | | | D | | | Q | |
| GAT | | | | V | | | | | D | | | Q | |
| CAC | | | | V | | | | | | N | | Q | N |
| CAC | | N | | V | | | | | | | | Q | N |
| CAC | | | | V | | | | | | N | | Q | N |

TABLE 1B

| | SpCas9 amino acid position | | | | | | | | | | | | | | | | | | |
|---|---|---|---|---|---|---|---|---|---|---|---|---|---|---|---|---|---|---|---|
| | 11 | 11 | 11 | 11 | 11 | 11 | 11 | 11 | 12 | 12 | 12 | 12 | 12 | 12 | 13 | 13 | 13 | 13 | 13 |
| | 14 | 34 | 35 | 37 | 39 | 51 | 80 | 88 | 11 | 19 | 21 | 56 | 64 | 90 | 18 | 17 | 20 | 23 | 33 |
| SpCas9 | R | F | D | P | V | K | D | K | K | E | Q | Q | H | V | L | N | A | A | R |
| GAA | | | | | | | | | | V | H | | | | | | V | | K |
| GAA | | | N | S | | | | | | V | | | | | | | V | D | K |
| GAA | | | N | | | | | | | V | H | | Y | | | | V | | K |
| CAA | | | N | | | | | | | V | H | | Y | | | | V | | K |
| CAA | G | | N | S | | | | | | V | H | | Y | | | | V | | K |
| CAA | | | N | | | | | R | | V | H | | | | | | V | | K |
| CAA | | | N | | | | G | | R | V | H | | Y | | | | V | | K |
| CAA | | | N | | | | | | | V | H | | Y | | | | V | | K |
| AAA | | | N | | | | G | | | V | H | R | Y | | | | V | D | K |
| CAA | G | | N | | | | G | | | V | H | | Y | | | | V | D | K |
| CAA | | L | N | | | | G | | | V | H | | Y | | | T | V | D | K |
| TAA | G | | N | | | | G | | | V | H | | Y | G | S | | V | D | K |
| TAA | G | | N | | | E | G | | | V | H | | Y | | S | | V | | K |
| TAA | G | | N | | | | G | | | V | H | | Y | | S | | V | D | K |
| TAA | G | | N | | | | G | | R | V | H | | | | | | V | | K |
| TAA | | | N | | | | G | | R | V | H | | Y | | | | V | | K |
| TAA | G | | N | | A | | G | | | V | H | | | | | | V | | K |
| TAA | G | | N | | | | | | | V | H | | | | | | V | | K |

TABLE 1C

| | SpCas9 amino acid position | | | | | | | | | | | | | | | | | | | |
|---|---|---|---|---|---|---|---|---|---|---|---|---|---|---|---|---|---|---|---|---|
| | 11 | 11 | 11 | 11 | 11 | 11 | 11 | 12 | 12 | 12 | 12 | 12 | 12 | 12 | 12 | 13 | 13 | 13 | 13 | 13 |
| | 14 | 31 | 35 | 50 | 56 | 80 | 91 | 18 | 19 | 21 | 27 | 49 | 53 | 86 | 93 | 20 | 21 | 32 | 35 | 39 |
| SpCas9 | R | Y | D | E | K | D | K | G | E | Q | A | P | E | N | A | A | P | D | R | T |
| SacB. | | | N | | | | N | | V | H | | | | | | V | S | | L | |
| TAT | | | | | | | | | | | | | | | | | | | | |
| SacB. | | | N | | | | | S | V | H | | S | | | | | S | G | L | |
| TAT | | | | | | | | | | | | | | | | | | | | |
| AAT | | | N | | | | | S | V | H | V | S | | K | T | | S | G | L | I |
| TAT | G | | N | | | G | | S | V | H | | S | K | | | | S | G | L | |
| TAT | G | | N | | | G | | S | V | H | | S | | | | | S | G | L | |
| TAT | G | C | N | | | G | | S | V | H | | S | | | | | S | G | L | |
| TAT | G | C | N | | | G | | S | V | H | | S | | | | | S | G | L | |
| TAT | G | C | N | | | G | | S | V | H | | S | | | | | S | G | L | |
| TAT | G | C | N | | E | G | | S | V | H | | S | | | | | S | G | L | |
| TAT | G | C | N | V | | G | | S | V | H | | S | | | | | S | G | L | |
| TAT | | C | N | | | G | | S | V | H | | S | | | | | S | G | L | |
| TAT | G | C | N | | | G | | S | V | H | | S | | | | | S | G | L | |

TABLE 1D

| | SpCas9 amino acid position | | | | | | | | | | | | | |
|---|---|---|---|---|---|---|---|---|---|---|---|---|---|---|
| | 111 | 112 | 113 | 118 | 120 | 121 | 123 | 128 | 130 | 133 | 133 | 133 | 133 | 134 |
| Sp- | 4 | 7 | 5 | 0 | 7 | 9 | 4 | 6 | 1 | 2 | 5 | 7 | 8 | 9 |
| Cas9 | R | D | D | D | E | E | N | N | P | D | R | T | S | H |
| SacB. | | | N | | | V | | | | N | Q | N | | |
| CAC | | | | | | | | | | | | | | |
| AAC | G | | N | | | V | | | | N | Q | N | | |
| AAC | G | | N | | | V | | | | N | Q | N | | |
| TAC | G | | N | | | V | | | | N | Q | N | | |
| TAC | G | | N | | | V | | H | | N | Q | N | | |
| TAC | G | | N | | G | V | D | H | | N | Q | N | | |
| TAC | G | | N | | | V | | | | N | Q | N | | |
| TAC | G | G | N | E | | V | | H | | N | Q | N | | |
| TAC | G | | N | | | V | | H | | N | Q | N | | |
| TAC | G | | N | | | V | | | | N | Q | N | T | R |

[0272] In some embodiments, the Cas9 is a Neisseria menigitidis Cas9 (NmeCas9) or a variant thereof. In some embodiments, the NmeCas9 has specificity for a NNNNGAYW PAM, wherein Y is C or T and W is A or T. In some embodiments, the NmeCas9 has specificity for a NNNNGYTT PAM, wherein Y is C or T. In some embodiments, the NmeCas9 has specificity for a NNNNGTCT PAM. In some embodiments, the NmeCas9 is a Nme1Cas9. In some embodiments, the NmeCas9 has specificity for a NNNNGATT PAM, a NNNNCCTA PAM, a NNNNCCTC PAM, a NNNNCCTT PAM, a NNNNCCTG PAM, a NNNNCCGT PAM, a NNNNCCGGPAM, a NNNNCCCA PAM, a NNNNCCCT PAM, a NNNNCCCC PAM, a NNNNCCAT PAM, a NNNNCCAG PAM, a NNNNCCAT PAM, or a NNNGATT PAM. In some embodiments, the Nme1Cas9 has specificity for a NNNNGATT PAM, a NNNNCCTA PAM, a NNNNCCTC PAM, a NNNNCCTT PAM, or a NNNNCCTG PAM. In some embodiments, the NmeCas9 has specificity for a CAA PAM, a CAAA PAM, or a CCA PAM. In some embodiments, the NmeCas9 is a Nme2 Cas9. In some embodiments, the NmeCas9 has specificity for a NNNNCC (N4CC) PAM, wherein N is any one of A, G, C, or T. in some embodiments, the NmeCas9 has specificity for a NNNNCCGT PAM, a NNNNCCGGPAM, a NNNNCCCA PAM, a NNNNCCCT PAM, a NNNNCCCC PAM, a NNNNCCAT PAM, a NNNNCCAG PAM, a NNNNCCAT PAM, or a NNNGATT PAM. In some embodiments, the NmeCas9 is a Nme3Cas9. In some embodiments, the NmeCas9 has specificity for a NNNNCAAA PAM, a NNNNCC PAM, or a NNNNCNNN PAM. Additional NmeCas9 features and PAM sequences as described in Edraki et al. Mol. Cell. (2019) 73(4): 714-726 is incorporated herein by reference in its entirety. An exemplary amino acid sequence of a Nme1Cas9 is provided below:

| type II CRISPR RNA-guided endonuclease Cas9 [Neisseria meningitidis] WP_002235162.1 | |
|---|---|
| 1 | maafkpnpin yilgldigia svgwamveid edenpiclid lgvrvferae vpktgdslam |
| 61 | arrlarsvrr ltrrrahrll rarrllkreg vlqaadfden glikslpntp wqlraaaldr |
| 121 | kltplewsav llhlikhrgy lsqrkneget adkelgallk gvadnahalq tgdfrtpael |
| 181 | alnkfekesg hirnqrgdys htfsrkdlqa elillfekqk efgnphvsgg lkegietllm |
| 241 | tqrpalsgda vqkmlghctf epaepkaakn tytaerfiwl tklnnlrile qgserpltdt |
| 301 | eratlmdepy rkskltyaqa rkllgledta ffkglrygkd naeastlmem kayhaisral |
| 361 | ekeglkdkks plnlspelqd eigtafslfk tdeditgrlk driqpeilea llkhisfdkf |
| 421 | vqislkalrr ivplmeqgkr ydeacaeiyg dhygkkntee kiylppipad eirnpvvlra |
| 481 | lsgarkving vvrrygspar ihietarevg ksfkdrkeie krqeenrkdr ekaaakfrey |
| 541 | fpnfvgepks kdilklrlye qqhgkclysg keinlgrlne kgyveidhal pfsrtwddsf |
| 601 | nnkvlvlgse nqnkgnqtpy eyfngkdnsr ewqefkarve tsrfprskkq rillqkfded |
| 661 | gfkernlndt ryvnrflcqf vadrmrltgk gkkrvfasng qitnllrgfw glrkvraend |
| 721 | rhhaldavvv acstvamqqk itrfvrykem nafdgktidk etgevlhqkt hfpqpweffa |
| 781 | qevmirvfgk pdgkpefeea dtpeklrtll aeklssrpea vheyvtplfv srapnrkmsg |
| 841 | qghmetvksa krldegvsvl rvpltqlklk dlekmvnrer epklyealka rleahkddpa |
| 901 | kafaepfyky dkagnrtqqv kavrveqvqk tgvwvrnhng iadnatmvry dvfekgdkyy |
| 961 | lvpiyswqva kgilpdravv qgkdeedwql iddsfnfkfs lhpndlvevi tkkarmfgyf |
| 1021 | aschrgtgni nirihdldhk igkngilegi gvktalsfqk yqidelgkei rpcrlkkrpp |
| 1081 | vr |

An exemplary amino acid sequence of a Nme2Cas9 is provided below:

| type II CRISPR RNA-guide dendonuclease Cas9 [Neisseria meningitidis] WP_002230835.1 | |
|---|---|
| 1 | maafkpnpin yilgldigia svgwamveid eeenpirlid lgvrvferae vpktgdslam |
| 61 | arrlarsvrr ltrrrahrll rarrllkreg vlqaadfden glikslpntp wqlraaaldr |
| 121 | kltplewsav llhlikhrgy lsqrkneget adkelgallk gvannahalq tgdfrtpael |
| 181 | alnkfekesg hirnqrgdys htfsrkdlqa elillfekqk efgnphvsgg lkegietllm |
| 241 | tqrpalsgda vqkmlghctf epaepkaakn tytaerfiwl tklnnlrile qgserpltdt |
| 301 | eratlmdepy rkskltyaqa rkllgledta ffkglrygkd naeastlmem kayhaisral |
| 361 | ekeglkdkks plnlsselqd eigtafslfk tdeditgrlk drvqpeilea llkhisfdkf |
| 421 | vqislkalrr ivplmeqgkr ydeacaeiyg dhygkkntee kiylppipad eirnpvvlra |
| 481 | lsgarkving vvrrygspar ihietarevg ksfkdrkeie krqeenrkdr ekaaakfrey |
| 541 | fpnfvgepks kdilklrlye qqhgkclysg keinlvrlne kgyveidhal pfsrtwddsf |
| 601 | nnkvlvlgse nqnkgnqtpy eyfngkdnsr ewqefkarve tsrfprskkq rillqkfded |
| 661 | gfkecnlndt ryvnrflcqf vadhilltgk gkrrvfasng qitnllrgfw glrkvraend |
| 721 | rhhaldavvv acstvamqqk itrfvrykem nafdgktidk etgkvlhqkt hfpqpweffa |
| 781 | qevmirvfgk pdgkpefeea dtpeklrtll aeklssrpea vheyvtplfv srapnrkmsg |
| 841 | ahkdtlrsak rfvkhnekis vkrvwlteik ladlenmvny kngreielye alkarleayg |
| 901 | gnakqafdpk dnpfykkggq lvkavrvekt qesgvllnkk naytiadngd mvrvdvfckv |
| 961 | dkkgknqyfi vpiyawqvae nilpdidckg yriddsytfc fslhkydlia fqkdekskve |
| 1021 | fayyincdss ngrfylawhd kgskeqqfri stqnlvliqk yqvnelgkei rpcrlkkrpp |
| 1081 | yr |

### Cas12 Domains of Nucleobase Editors

[0273] Typically, microbial CRISPR-Cas systems are divided into Class 1 and Class 2 systems. Class 1 systems have multisubunit effector complexes, while Class 2 systems have a single protein effector. For example, Cas9 and Cpf1 are Class 2 effectors, albeit different types (Type II and Type V, respectively). In addition to Cpf1, Class 2, Type V CRISPR-Cas systems also comprise Cas12a/Cpf1, Cas12b/C2c1, Cas12c/C2c3, Cas12d/CasY, Cas12e/CasX, Cas12g, Cas12h, and Cas12i). See, e.g., Shmakov et al., “Discovery and Functional Characterization of Diverse Class 2 CRISPR Cas Systems,” Mol. Cell, 2015 Nov. 5; 60(3): 385-397; Makarova et al., “Classification and Nomenclature of CRISPR-Cas Systems: Where from Here?” CRISPR Journal, 2018, 1(5): 325-336; and Yan et al., “Functionally Diverse Type V CRISPR-Cas Systems,” Science, 2019 Jan. 4; 363: 88-91; the entire contents of each is hereby incorporated by reference. Type V Cas proteins contain a RuvC (or RuvC-like) endonuclease domain. While production of mature CRISPR RNA (crRNA) is generally tracrRNA-independent, Cas12b/C2c1, for example, requires tracrRNA for production of crRNA. Cas12b/C2c1 depends on both crRNA and tracrRNA for DNA cleavage.

[0274] Nucleic acid programmable DNA binding proteins contemplated in the present invention include Cas proteins that are classified as Class 2, Type V (Cas12 proteins). Non-limiting examples of Cas Class 2, Type V proteins include Cas12a/Cpf1, Cas12b/C2c1, Cas12c/C2c3, Cas12d/CasY, Cas12e/CasX, Cas12g, Cas12h, and Cas12i, homologues thereof, or modified versions thereof. As used herein, a Cas12 protein can also be referred to as a Cas12 nuclease, a Cas12 domain, or a Cas12 protein domain. In some embodiments, the Cas12 proteins of the present invention comprise an amino acid sequence interrupted by an internally fused protein domain such as a deaminase domain.

[0275] In some embodiments, the Cas12 domain is a nuclease inactive Cas12 domain or a Cas12 nickase. In some embodiments, the Cas12 domain is a nuclease active domain. For example, the Cas12 domain may be a Cas12 domain that nicks one strand of a duplexed nucleic acid (e.g., duplexed DNA molecule). In some embodiments, the Cas12 domain comprises any one of the amino acid sequences as set forth herein. In some embodiments the

[0276] Cas12 domain comprises an amino acid sequence that is at least 60%, at least 65%, at least 70%, at least 75%, at least 80%, at least 85%, at least 90%, at least 95%, at least 96%, at least 97%, at least 98%, at least 99%, or at least 99.5% identical to any one of the amino acid sequences set forth herein. In some embodiments, the Cas12 domain comprises an amino acid sequence that has 1, 2, 3, 4, 5, 6, 7, 8, 9, 10, 11, 12, 13, 14, 15, 16, 17, 18, 19, 20, 21, 22, 21, 24, 25, 26, 27, 28, 29, 30, 31, 32, 33, 34, 35, 36, 37, 38, 39, 40, 41, 42, 43, 44, 45, 46, 47, 48, 49, 50 or more mutations compared to any one of the amino acid sequences set forth herein. In some embodiments, the Cas12 domain comprises an amino acid sequence that has at least 10, at least 15, at least 20, at least 30, at least 40, at least 50, at least 60, at least 70, at least 80, at least 90, at least 100, at least 150, at least 200, at least 250, at least 300, at least 350, at least 400, at least 500, at least 600, at least 700, at least 800, at least 900, at least 1000, at least 1100, or at least 1200 identical contiguous amino acid residues as compared to any one of the amino acid sequences set forth herein.

[0277] In some embodiments, proteins comprising fragments of Cas12 are provided. For example, in some embodiments, a protein comprises one of two Cas12 domains: (1) the gRNA binding domain of Cas12; or (2) the DNA cleavage domain of Cas12. In some embodiments, proteins comprising Cas12 or fragments thereof are referred to as “Cas12 variants.” A Cas12 variant shares homology to Cas12, or a fragment thereof. For example, a Cas12 variant is at least about 70% identical, at least about 80% identical, at least about 90% identical, at least about 95% identical, at least about 96% identical, at least about 97% identical, at least about 98% identical, at least about 99% identical, at least about 99.5% identical, or at least about 99.9% identical to wild type Cas12. In some embodiments, the Cas12 variant may have 1, 2, 3, 4, 5, 6, 7, 8, 9, 10, 11, 12, 13, 14, 15, 16, 17, 18, 19, 20, 21, 22, 21, 24, 25, 26, 27, 28, 29, 30, 31, 32, 33, 34, 35, 36, 37, 38, 39, 40, 41, 42, 43, 44, 45, 46, 47, 48, 49, 50 or more amino acid changes compared to wild type Cas12. In some embodiments, the Cas12 variant comprises a fragment of Cas12 (e.g., a gRNA binding domain or a DNA cleavage domain), such that the fragment is at least about 70% identical, at least about 80% identical, at least about 90% identical, at least about 95% identical, at least about 96% identical, at least about 97% identical, at least about 98% identical, at least about 99% identical, at least about 99.5% identical, or at least about 99.9% identical to the corresponding fragment of wild type Cas12. In some embodiments, the fragment is at least 30%, at least 35%, at least 40%, at least 45%, at least 50%, at least 55%, at least 60%, at least 65%, at least 70%, at least 75%, at least 80%, at least 85%, at least 90%, at least 95% identical, at least 96%, at least 97%, at least 98%, at least 99%, or at least 99.5% of the amino acid length of a corresponding wild type Cas12. In some embodiments, the fragment is at least 100 amino acids in length. In some embodiments, the fragment is at least 100, 150, 200, 250, 300, 350, 400, 450, 500, 550, 600, 650, 700, 750, 800, 850, 900, 950, 1000, 1050, 1100, 1150, 1200, 1250, or at least 1300 amino acids in length.

[0278] In some embodiments, Cas12 corresponds to, or comprises in part or in whole, a Cas12 amino acid sequence having one or more mutations that alter the Cas12 nuclease activity. Such mutations, by way of example, include amino acid substitutions within the RuvC nuclease domain of Cas12. In some embodiments, variants or homologues of Cas12 are provided which are at least about 70% identical, at least about 80% identical, at least about 90% identical, at least about 95% identical, at least about 98% identical, at least about 99% identical, at least about 99.5% identical, or at least about 99.9% identical to a wild type Cas12. In some embodiments, variants of Cas12 are provided having amino acid sequences which are shorter, or longer, by about 5 amino acids, by about 10 amino acids, by about 15 amino acids, by about 20 amino acids, by about 25 amino acids, by about 30 amino acids, by about 40 amino acids, by about 50 amino acids, by about 75 amino acids, by about 100 amino acids or more.

[0279] In some embodiments, Cas12 fusion proteins as provided herein comprise the full-length amino acid sequence of a Cas12 protein, e.g., one of the Cas12 sequences provided herein. In other embodiments, however, fusion proteins as provided herein do not comprise a full-length Cas12 sequence, but only one or more fragments thereof. Exemplary amino acid sequences of suitable Cas12 domains are provided herein, and additional suitable sequences of Cas12 domains and fragments will be apparent to those of skill in the art.

[0280] Generally, the class 2, Type V Cas proteins have a single functional RuvC endonuclease domain (See, e.g., Chen et al., “CRISPR-Cas12a target binding unleashes indiscriminate single-stranded DNase activity,” Science 360:436-439 (2018)). In some cases, the Cas12 protein is a variant Cas12b protein. (See Strecker et al., Nature Communications, 2019, 10(1): Art. No.: 212). In one embodiment, a variant Cas12 polypeptide has an amino acid sequence that is different by 1, 2, 3, 4, 5 or more amino acids (e.g., has a deletion, insertion, substitution, fusion) when compared to the amino acid sequence of a wild type Cas12 protein. In some instances, the variant Cas12 polypeptide has an amino acid change (e.g., deletion, insertion, or substitution) that reduces the activity of the Cas12 polypeptide. For example, in some instances, the variant Cas12 is a Cas12b polypeptide that has less than 50%, less than 40%, less than 30%, less than 20%, less than 10%, less than 5%, or less than 1% of the nickase activity of the corresponding wild-type Cas12b protein. In some cases, the variant Cas12b protein has no substantial nickase activity.

[0281] In some cases, a variant Cas12b protein has reduced nickase activity. For example, a variant Cas12b protein exhibits less than about 20%, less than about 15%, less than about 10%, less than about 5%, less than about 1%, or less than about 0.1%, of the nickase activity of a wild-type Cas12b protein.

[0282] In some embodiments, the Cas12 protein includes RNA-guided endonucleases from the Cas12a/Cpf1 family that displays activity in mammalian cells. CRISPR from Prevotella and Francisella 1 (CRISPR/Cpf1) is a DNA editing technology analogous to the CRISPR/Cas9 system. Cpf1 is an RNA-guided endonuclease of a class II CRISPR/Cas system. This acquired immune mechanism is found in Prevotella and Francisella bacteria. Cpf1 genes are associated with the CRISPR locus, coding for an endonuclease that use a guide RNA to find and cleave viral DNA. Cpf1 is a smaller and simpler endonuclease than Cas9, overcoming some of the CRISPR/Cas9 system limitations. Unlike Cas9 nucleases, the result of Cpf1-mediated DNA cleavage is a double-strand break with a short 3′ overhang. Cpf1's staggered cleavage pattern can open up the possibility of directional gene transfer, analogous to traditional restriction enzyme cloning, which can increase the efficiency of gene editing. Like the Cas9 variants and orthologues described above, Cpf1 can also expand the number of sites that can be targeted by CRISPR to AT-rich regions or AT-rich genomes that lack the NGG PAM sites favored by SpCas9. The Cpf1 locus contains a mixed alpha/beta domain, a RuvC-I followed by a helical region, a RuvC-II and a zinc finger-like domain. The Cpf1 protein has a RuvC-like endonuclease domain that is similar to the RuvC domain of Cas9. Furthermore, Cpf1, unlike Cas9, does not have a HNH endonuclease domain, and the N-terminal of Cpf1 does not have the alpha-helical recognition lobe of Cas9. Cpf1 CRISPR-Cas domain architecture shows that Cpf1 is functionally unique, being classified as Class 2, type V CRISPR system. The Cpf1 loci encode Cas1, Cas2, and Cas4 proteins are more similar to types I and III than type II systems. Functional Cpf1 does not require the trans-activating CRISPR RNA (tracrRNA), therefore, only CRISPR (crRNA) is required. This benefits genome editing because Cpf1 is not only smaller than Cas9, but also it has a smaller sgRNA molecule (approximately half as many nucleotides as Cas9). The Cpf1-crRNA complex cleaves target DNA or RNA by identification of a protospacer adjacent motif 5′-YTN-3′ or 5′-TTTN-3′ in contrast to the G-rich PAM targeted by Cas9. After identification of PAM, Cpf1 introduces a sticky-end-like DNA double-stranded break having an overhang of 4 or 5 nucleotides.

[0283] In some aspects of the present invention, a vector encodes a CRISPR enzyme that is mutated to with respect to a corresponding wild-type enzyme such that the mutated CRISPR enzyme lacks the ability to cleave one or both strands of a target polynucleotide containing a target sequence can be used. Cas12 can refer to a polypeptide with at least or at least about 50%, 60%, 70%, 80%, 90%, 91%, 92%, 93%, 94%, 95%, 96%, 97%, 98%, 99%, or 100% sequence identity and/or sequence homology to a wild type exemplary Cas12 polypeptide (e.g., Cas12 from Bacillus hisashii). Cas12 can refer to a polypeptide with at most or at most about 50%, 60%, 70%, 80%, 90%, 91%, 92%, 93%, 94%, 95%, 96%, 97%, 98%, 99%, or 100% sequence identity and/or sequence homology to a wild type exemplary Cas12 polypeptide (e.g., from Bacillus hisashii (BhCas12b), Bacillus sp. V3-13 (BvCas12b), and Alicyclobacillus acidiphilus (AaCas12b)). Cas12 can refer to the wild type or a modified form of the Cas12 protein that can comprise an amino acid change such as a deletion, insertion, substitution, variant, mutation, fusion, chimera, or any combination thereof.

### Nucleic Acid Programmable DNA Binding Proteins

[0284] Some aspects of the disclosure provide fusion proteins comprising domains that act as nucleic acid programmable DNA binding proteins, which may be used to guide a protein, such as a base editor, to a specific nucleic acid (e.g., DNA or RNA) sequence. In particular embodiments, a fusion protein comprises a nucleic acid programmable DNA binding protein domain and a deaminase domain. Non-limiting examples of nucleic acid programmable DNA binding proteins include, Cas9 (e.g., dCas9 and nCas9), Cas12a/Cpf1, Cas12b/C2c1, Cas12c/C2c3, Cas12d/CasY, Cas12e/CasX, Cas12g, Cas12h, and Cas12i. Non-limiting examples of Cas enzymes include Cas1, Cas1B, Cas2, Cas3, Cas4, Cas5, Cas5d, Cas5t, Cas5h, Cas5a, Cas6, Cas7, Cas8, Cas8a, Cas8b, Cas8c, Cas9 (also known as Csn1 or Csx12),

[0285] Cas10, Cas10d, Cas12a/Cpf1, Cas12b/C2c1, Cas12c/C2c3, Cas12d/CasY, Cas12e/CasX, Cas12g, Cas12h, Cas12i, Csy1, Csy2, Csy3, Csy4, Cse1, Cse2, Cse3, Cse4, Cse5e, Csc1, Csc2, Csa5, Csn1, Csn2, Csm1, Csm2, Csm3, Csm4, Csm5, Csm6, Cmr1, Cmr3, Cmr4, Cmr5, Cmr6, Csb1, Csb2, Csb3, Csx17, Csx14, Csx10, Csx16, CsaX, Csx3, Csx1, Csx1S, Csx11, Csf1, Csf2, CsO, Csf4, Csd1, Csd2, Cst1, Cst2, Csh1, Csh2, Csa1, Csa2, Csa3, Csa4, Csa5, Type II Cas effector proteins, Type V Cas effector proteins, Type VI Cas effector proteins, CARF, DinG, homologues thereof, or modified or engineered versions thereof. Other nucleic acid programmable DNA binding proteins are also within the scope of this disclosure, although they may not be specifically listed in this disclosure. See, e.g., Makarova et al. “Classification and Nomenclature of CRISPR-Cas Systems: Where from Here?” CRISPR J. 2018 Oct; 1:325-336. doi: 10.1089/crispr.2018.0033; Yan et al., “Functionally diverse type V CRISPR-Cas systems” Science. 2019 Jan. 4; 363(6422):88-91. doi: 10.1126/science.aav7271, the entire contents of each are hereby incorporated by reference.

[0286] One example of a nucleic acid programmable DNA-binding protein that has different PAM specificity than Cas9 is Clustered Regularly Interspaced Short Palindromic Repeats from Prevotella and Francisella 1 (Cpf1). Similar to Cas9, Cpf1 is also a class 2 CRISPR effector. It has been shown that Cpf1 mediates robust DNA interference with features distinct from Cas9. Cpf1 is a single RNA-guided endonuclease lacking tracrRNA, and it utilizes a T-rich protospacer-adjacent motif (TTN, TTTN, or YTN). Moreover, Cpf1 cleaves DNA via a staggered DNA double-stranded break. Out of 16 Cpf1-family proteins, two enzymes from Acidaminococcus and Lachnospiraceae are shown to have efficient genome-editing activity in human cells. Cpf1 proteins are known in the art and have been described previously, for example Yamano et al., “Crystal structure of Cpf1 in complex with guide RNA and target DNA.” Cell (165) 2016, p. 949-962; the entire contents of which is hereby incorporated by reference.

[0287] Useful in the present compositions and methods are nuclease-inactive Cpf1 (dCpf1) variants that may be used as a guide nucleotide sequence-programmable DNA-binding protein domain. The Cpf1 protein has a RuvC-like endonuclease domain that is similar to the RuvC domain of Cas9 but does not have a HNH endonuclease domain, and the N-terminal of Cpf1 does not have the alfa-helical recognition lobe of Cas9. It was shown in Zetsche et al., Cell, 163, 759-771, 2015 (which is incorporated herein by reference) that, the RuvC-like domain of Cpf1 is responsible for cleaving both DNA strands and inactivation of the RuvC-like domain inactivates Cpf1 nuclease activity. For example, mutations corresponding to D917A, E1006A, or D1255A in Francisella novicida Cpf1 inactivate Cpf1 nuclease activity. In some embodiments, the dCpf1 of the present disclosure comprises mutations corresponding to D917A, E1006A, D1255A, D917A/E1006A, D917A/D1255A, E1006A/D1255A, or D917A/E1006A/D1255A. It is to be understood that any mutations, e.g., substitution mutations, deletions, or insertions that inactivate the RuvC domain of Cpf1, may be used in accordance with the present disclosure.

[0288] In some embodiments, the nucleic acid programmable DNA binding protein (napDNAbp) of any of the fusion proteins provided herein may be a Cpf1 protein. In some embodiments, the Cpf1 protein is a Cpf1 nickase (nCpf1). In some embodiments, the Cpf1protein is a nuclease inactive Cpf1 (dCpf1). In some embodiments, the Cpf1, the nCpf1, or the dCpf1 comprises an amino acid sequence that is at least 85%, at least 90%, at least 91%, at least 92%, at least 93%, at least 94%, at least 95%, at least 96%, at least 97%, at least 98%, at least 99%, or at least 99.5% identical to a Cpf1 sequence disclosed herein. In some embodiments, the dCpf1 comprises an amino acid sequence that is at least 85%, at least 90%, at least 91%, at least 92%, at least 93%, at least 94%, at least 95%, at least 96%, at least 97%, at least 98%, at least 99%, or at ease 99.5% identical to a Cpf1 sequence disclosed herein, and comprises mutations corresponding to D917A, E1006A, D1255A, D917A/E1006A, D917A/D1255A, E1006A/D1255A, or D917A/E1006A/D1255A. It should be appreciated that Cpf1 from other bacterial species may also be used in accordance with the present disclosure.

Wild-type Francisella novicida Cpf1 (D917, E1006, and D1255 are bolded
and underlined)
MSIYQEFVNKYSLSKTLRFELIPQGKTLENIKARGLILDDEKRAKDYKKAKQIIDKYHQFFI
EEILSSVCISEDLLQNYSDVYFKLKKSDDDNLQKDFKSAKDTIKKQISEYIKDSEKFKNLFN
QNLIDAKKGQESDLILWLKQSKDNGIELFKANSDITDIDEALEIIKSFKGWTTYFKGFHENR
KNVYSSNDIPTSIIYRIVDDNLPKFLENKAKYESLKDKAPEAINYEQIKKDLAEELTFDIDY
KTSEVNQRVFSLDEVFEIANFNNYLNQSGITKFNTIIGGKFVNGENTKRKGINEYINLYSQQ
INDKTLKKYKMSVLFKQILSDTESKSFVIDKLEDDSDVVTTMQSFYEQIAAFKTVEEKSIKE
TLSLLFDDLKAQKLDLSKIYFKNDKSLTDLSQQVFDDYSVIGTAVLEYITQQIAPKNLDNPS
KKEQELIAKKTEKAKYLSLETIKLALEEFNKHRDIDKQCRFEEILANFAAIPMIFDEIAQNK
DNLAQISIKYQNQGKKDLLQASAEDDVKAIKDLLDQTNNLLHKLKIFHISQSEDKANILDKD
EHFYLVFEECYFELANIVPLYNKIRNYITQKPYSDEKFKLNFENSTLANGWDKNKEPDNTAI
LFlKDDKYYLGVMNKKNNKIFDDKAIKENKGEGYKKIVYKLLPGANKMLPKVFFSAKSIKFY
NPSEDILRIRNHSTHTKNGSPQKGYEKFEFNIEDCRKFIDFYKQSISKHPEWKDFGFRFSDT
QRYNSIDEFYREVENQGYKLTFENISESYIDSVVNQGKLYLFQIYNKDFSAYSKGRPNLHTL
YWKALFDERNLQDVVYKLNGEAELFYRKQSIPKKITHPAKEAIANKNKDNPKKESVFEYDLI
KDKRFTEDKFFFHCPITINFKSSGANKFNDEINLLLKEKANDVHILSIDRGERHLAYYTLVD
GKGNIIKQDTFNIIGNDRMKTNYHDKLAAIEKDRDSARKDWKKINNIKEMKEGYLSQVVHEI
AKLVIEYNAIVVFEDLNFGFKRGRFKVEKQVYQKLEKMLIEKLNYLVFKDNEFDKTGGVLRA
YQLTAPFETFKKMGKQTGIIYYVPAGFTSKICPVTGFVNQLYPKYESVSKSQEFFSKFDKIC
YNLDKGYFEFSFDYKNFGDKAAKGKWTIASFGSRLINFRNSDKNHNWDTREVYPTKELEKLL
KDYSIEYGHGECIKAAICGESDKKFFAKLTSVLNTILQMRNSKTGTELDYLISPVADVNGNF
FDSRQAPKNMPQDADANGAYHIGLKGLMLLGRIKNNQEGKKLNLVIKNEEYFEFVQNRNN
Francisella novicida Cpf1 D917A (A917, E1006, and D1255 are bolded and
underlined)
MSIYQEFVNKYSLSKTLRFELIPQGKTLENIKARGLILDDEKRAKDYKKAKQIIDKYHQFFI
EEILSSVCISEDLLQNYSDVYFKLKKSDDDNLQKDFKSAKDTIKKQISEYIKDSEKFKNLFN
QNLIDAKKGQESDLILWLKQSKDNGIELFKANSDITDIDEALEIIKSFKGWTTYFKGFHENR
KNVYSSNDIPTSIIYRIVDDNLPKFLENKAKYESLKDKAPEAINYEQIKKDLAEELTFDIDY
KTSEVNQRVFSLDEVFEIANFNNYLNQSGITKFNTIIGGKFVNGENTKRKGINEYINLYSQQ
INDKTLKKYKMSVLFKQILSDTESKSFVIDKLEDDSDVVTTMQSFYEQIAAFKTVEEKSIKE
TLSLLFDDLKAQKLDLSKIYFKNDKSLTDLSQQVFDDYSVIGTAVLEYITQQIAPKNLDNPS
KKEQELIAKKTEKAKYLSLETIKLALEEFNKHRDIDKQCRFEEILANFAAIPMIFDEIAQNK
DNLAQISIKYQNQGKKDLLQASAEDDVKAIKDLLDQTNNLLHKLKIFHISQSEDKANILDKD
EHFYLVFEECYFELANIVPLYNKIRNYITQKPYSDEKFKLNFENSTLANGWDKNKEPDNTAI
LFlKDDKYYLGVMNKKNNKIFDDKAIKENKGEGYKKIVYKLLPGANKMLPKVFFSAKSIKFY
NPSEDILRIRNHSTHTKNGSPQKGYEKFEFNIEDCRKFIDFYKQSISKHPEWKDFGFRFSDT
QRYNSIDEFYREVENQGYKLTFENISESYIDSVVNQGKLYLFQIYNKDFSAYSKGRPNLHTL
YWKALFDERNLQDVVYKLNGEAELFYRKQSIPKKITHPAKEAIANKNKDNPKKESVFEYDLI
KDKRFTEDKFFFHCPITINFKSSGANKFNDEINLLLKEKANDVHILSIARGERHLAYYTLVD
GKGNIIKQDTFNIIGNDRMKTNYHDKLAAIEKDRDSARKDWKKINNIKEMKEGYLSQVVHEI
AKLVIEYNAIVVFEDLNFGFKRGRFKVEKQVYQKLEKMLIEKLNYLVFKDNEFDKTGGVLRA
YQLTAPFETFKKMGKQTGIIYYVPAGFTSKICPVTGFVNQLYPKYESVSKSQEFFSKFDKIC
YNLDKGYFEFSFDYKNFGDKAAKGKWTIASFGSRLINFRNSDKNHNWDTREVYPTKELEKLL
KDYSIEYGHGECIKAAICGESDKKFFAKLTSVLNTILQMRNSKTGTELDYLISPVADVNGNF
FDSRQAPKNMPQDADANGAYHIGLKGLMLLGRIKNNQEGKKLNLVIKNEEYFEFVQNRNN
Francisella novicida Cpf1 E1006A (D917, A1006, and D1255 are bolded and
underlined)
MSIYQEFVNKYSLSKTLRFELIPQGKTLENIKARGLILDDEKRAKDYKKAKQIIDKYHQFFI
EEILSSVCISEDLLQNYSDVYFKLKKSDDDNLQKDFKSAKDTIKKQISEYIKDSEKFKNLFN
QNLIDAKKGQESDLILWLKQSKDNGIELFKANSDITDIDEALEIIKSFKGWTTYFKGFHENR
KNVYSSNDIPTSIIYRIVDDNLPKFLENKAKYESLKDKAPEAINYEQIKKDLAEELTFDIDY
KTSEVNQRVFSLDEVFEIANFNNYLNQSGITKFNTIIGGKFVNGENTKRKGINEYINLYSQQ
INDKTLKKYKMSVLFKQILSDTESKSFVIDKLEDDSDVVTTMQSFYEQIAAFKTVEEKSIKE
TLSLLFDDLKAQKLDLSKIYFKNDKSLTDLSQQVFDDYSVIGTAVLEYITQQIAPKNLDNPS
KKEQELIAKKTEKAKYLSLETIKLALEEFNKHRDIDKQCRFEEILANFAAIPMIFDEIAQNK
DNLAQISIKYQNQGKKDLLQASAEDDVKAIKDLLDQTNNLLHKLKIFHISQSEDKANILDKD
EHFYLVFEECYFELANIVPLYNKIRNYITQKPYSDEKFKLNFENSTLANGWDKNKEPDNTAI
LFIKDDKYYLGVMNKKNNKIFDDKAIKENKGEGYKKIVYKLLPGANKMLPKVFFSAKSIKFY
NPSEDILRIRNHSTHTKNGSPQKGYEKFEFNIEDCRKFIDFYKQSISKHPEWKDFGFRFSDT
QRYNSIDEFYREVENQGYKLTFENISESYIDSVVNQGKLYLFQIYNKDFSAYSKGRPNLHTL
YWKALFDERNLQDVVYKLNGEAELFYRKQSIPKKITHPAKEAIANKNKDNPKKESVFEYDLI
KDKRFTEDKFFFHCPITINFKSSGANKFNDEINLLLKEKANDVHILSIDRGERHLAYYTLVD
GKGNIIKQDTFNIIGNDRMKTNYHDKLAAIEKDRDSARKDWKKINNIKEMKEGYLSQVVHEI
AKLVIEYNAIVVFADLNFGFKRGRFKVEKQVYQKLEKMLIEKLNYLVFKDNEFDKTGGVLRA
YQLTAPFETFKKMGKQTGIIYYVPAGFTSKICPVTGFVNQLYPKYESVSKSQEFFSKFDKIC
YNLDKGYFEFSFDYKNFGDKAAKGKWTIASFGSRLINFRNSDKNHNWDTREVYPTKELEKLL
KDYSIEYGHGECIKAAICGESDKKFFAKLTSVLNTILQMRNSKTGTELDYLISPVADVNGNF
FDSRQAPKNMPQDADANGAYHIGLKGLMLLGRIKNNQEGKKLNLVIKNEEYFEFVQNRNN
Francisella novicida Cpf1 D1255A (D917, E1006, and A1255 are bolded and
underlined)
MSIYQEFVNKYSLSKTLRFELIPQGKTLENIKARGLILDDEKRAKDYKKAKQIIDKYHQFFI
EEILSSVCISEDLLQNYSDVYFKLKKSDDDNLQKDFKSAKDTIKKQISEYIKDSEKFKNLFN
QNLIDAKKGQESDLILWLKQSKDNGIELFKANSDITDIDEALEIIKSFKGWTTYFKGFHENR
KNVYSSNDIPTSIIYRIVDDNLPKFLENKAKYESLKDKAPEAINYEQIKKDLAEELTFDIDY
KTSEVNQRVFSLDEVFEIANFNNYLNQSGITKFNTIIGGKFVNGENTKRKGINEYINLYSQQ
INDKTLKKYKMSVLFKQILSDTESKSFVIDKLEDDSDVVTTMQSFYEQIAAFKTVEEKSIKE
TLSLLFDDLKAQKLDLSKIYFKNDKSLTDLSQQVFDDYSVIGTAVLEYITQQIAPKNLDNPS
KKEQELIAKKTEKAKYLSLETIKLALEEFNKHRDIDKQCRFEEILANFAAIPMIFDEIAQNK
DNLAQISIKYQNQGKKDLLQASAEDDVKAIKDLLDQTNNLLHKLKIFHISQSEDKANILDKD
EHFYLVFEECYFELANIVPLYNKIRNYITQKPYSDEKFKLNFENSTLANGWDKNKEPDNTAI
LFIKDDKYYLGVMNKKNNKIFDDKAIKENKGEGYKKIVYKLLPGANKMLPKVFFSAKSIKFY
NPSEDILRIRNHSTHTKNGSPQKGYEKFEFNIEDCRKFIDFYKQSISKHPEWKDFGFRFSDT
QRYNSIDEFYREVENQGYKLTFENISESYIDSVVNQGKLYLFQIYNKDFSAYSKGRPNLHTL
YWKALFDERNLQDVVYKLNGEAELFYRKQSIPKKITHPAKEAIANKNKDNPKKESVFEYDLI
KDKRFTEDKFFFHCPITINFKSSGANKFNDEINLLLKEKANDVHILSIDRGERHLAYYTLVD
GKGNIIKQDTFNIIGNDRMKTNYHDKLAAIEKDRDSARKDWKKINNIKEMKEGYLSQVVHEI
AKLVIEYNAIVVFEDLNFGFKRGRFKVEKQVYQKLEKMLIEKLNYLVFKDNEFDKTGGVLRA
YQLTAPFETFKKMGKQTGIIYYVPAGFTSKICPVTGFVNQLYPKYESVSKSQEFFSKFDKIC
YNLDKGYFEFSFDYKNFGDKAAKGKWTIASFGSRLINFRNSDKNHNWDTREVYPTKELEKLL
KDYSIEYGHGECIKAAICGESDKKFFAKLTSVLNTILQMRNSKTGTELDYLISPVADVNGNF
FDSRQAPKNMPQDAAANGAYHIGLKGLMLLGRIKNNQEGKKLNLVIKNEEYFEFVQNRNN
Francisella novicida Cpf1 D917A/E1006A (A917, A1006, and D1255 are
bolded and underlined)
MSIYQEFVNKYSLSKTLRFELIPQGKTLENIKARGLILDDEKRAKDYKKAKQIIDKYHQFFI
EEILSSVCISEDLLQNYSDVYFKLKKSDDDNLQKDFKSAKDTIKKQISEYIKDSEKFKNLFN
QNLIDAKKGQESDLILWLKQSKDNGIELFKANSDITDIDEALEIIKSFKGWTTYFKGFHENR
KNVYSSNDIPTSIIYRIVDDNLPKFLENKAKYESLKDKAPEAINYEQIKKDLAEELTFDIDY
KTSEVNQRVFSLDEVFEIANFNNYLNQSGITKFNTIIGGKFVNGENTKRKGINEYINLYSQQ
INDKTLKKYKMSVLFKQILSDTESKSFVIDKLEDDSDVVTTMQSFYEQIAAFKTVEEKSIKE
TLSLLFDDLKAQKLDLSKIYFKNDKSLTDLSQQVFDDYSVIGTAVLEYITQQIAPKNLDNPS
KKEQELIAKKTEKAKYLSLETIKLALEEFNKHRDIDKQCRFEEILANFAAIPMIFDEIAQNK
DNLAQISIKYQNQGKKDLLQASAEDDVKAIKDLLDQTNNLLHKLKIFHISQSEDKANILDKD
EHFYLVFEECYFELANIVPLYNKIRNYITQKPYSDEKFKLNFENSTLANGWDKNKEPDNTAI
LFIKDDKYYLGVMNKKNNKIFDDKAIKENKGEGYKKIVYKLLPGANKMLPKVFFSAKSIKFY
NPSEDILRIRNHSTHTKNGSPQKGYEKFEFNIEDCRKFIDFYKQSISKHPEWKDFGFRFSDT
QRYNSIDEFYREVENQGYKLTFENISESYIDSVVNQGKLYLFQIYNKDFSAYSKGRPNLHTL
YWKALFDERNLQDVVYKLNGEAELFYRKQSIPKKITHPAKEAIANKNKDNPKKESVFEYDLI
KDKRFTEDKFFFHCPITINFKSSGANKFNDEINLLLKEKANDVHILSIARGERHLAYYTLVD
GKGNIIKQDTFNIIGNDRMKTNYHDKLAAIEKDRDSARKDWKKINNIKEMKEGYLSQVVHEI
AKLVIEYNAIVVFADLNFGFKRGRFKVEKQVYQKLEKMLIEKLNYLVFKDNEFDKTGGVLRA
YQLTAPFETFKKMGKQTGIIYYVPAGFTSKICPVTGFVNQLYPKYESVSKSQEFFSKFDKIC
YNLDKGYFEFSFDYKNFGDKAAKGKWTIASFGSRLINFRNSDKNHNWDTREVYPTKELEKLL
KDYSIEYGHGECIKAAICGESDKKFFAKLTSVLNTILQMRNSKTGTELDYLISPVADVNGNF
FDSRQAPKNMPQDADANGAYHIGLKGLMLLGRIKNNQEGKKLNLVIKNEEYFEFVQNRNN
Francisella novicida Cpf1 D917A/D1255A (A917, E1006, and A1255 are
bolded and underlined)
MSIYQEFVNKYSLSKTLRFELIPQGKTLENIKARGLILDDEKRAKDYKKAKQIIDKYHQFFI
EEILSSVCISEDLLQNYSDVYFKLKKSDDDNLQKDFKSAKDTIKKQISEYIKDSEKFKNLFN
QNLIDAKKGQESDLILWLKQSKDNGIELFKANSDITDIDEALEIIKSFKGWTTYFKGFHENR
KNVYSSNDIPTSIIYRIVDDNLPKFLENKAKYESLKDKAPEAINYEQIKKDLAEELTFDIDY
KTSEVNQRVFSLDEVFEIANFNNYLNQSGITKFNTIIGGKFVNGENTKRKGINEYINLYSQQ
INDKTLKKYKMSVLFKQILSDTESKSFVIDKLEDDSDVVTTMQSFYEQIAAFKTVEEKSIKE
TLSLLFDDLKAQKLDLSKIYFKNDKSLTDLSQQVFDDYSVIGTAVLEYITQQIAPKNLDNPS
KKEQELIAKKTEKAKYLSLETIKLALEEFNKHRDIDKQCRFEEILANFAAIPMIFDEIAQNK
DNLAQISIKYQNQGKKDLLQASAEDDVKAIKDLLDQTNNLLHKLKIFHISQSEDKANILDKD
EHFYLVFEECYFELANIVPLYNKIRNYITQKPYSDEKFKLNFENSTLANGWDKNKEPDNTAI
LFIKDDKYYLGVMNKKNNKIFDDKAIKENKGEGYKKIVYKLLPGANKMLPKVFFSAKSIKFY
NPSEDILRIRNHSTHTKNGSPQKGYEKFEFNIEDCRKFIDFYKQSISKHPEWKDFGFRFSDT
QRYNSIDEFYREVENQGYKLTFENISESYIDSVVNQGKLYLFQIYNKDFSAYSKGRPNLHTL
YWKALFDERNLQDVVYKLNGEAELFYRKQSIPKKITHPAKEAIANKNKDNPKKESVFEYDLI
KDKRFTEDKFFFHCPITINFKSSGANKFNDEINLLLKEKANDVHILSIARGERHLAYYTLVD
GKGNIIKQDTFNIIGNDRMKTNYHDKLAAIEKDRDSARKDWKKINNIKEMKEGYLSQVVHEI
AKLVIEYNAIVVFEDLNFGFKRGRFKVEKQVYQKLEKMLIEKLNYLVFKDNEFDKTGGVLRA
YQLTAPFETFKKMGKQTGIIYYVPAGFTSKICPVTGFVNQLYPKYESVSKSQEFFSKFDKIC
YNLDKGYFEFSFDYKNFGDKAAKGKWTIASFGSRLINFRNSDKNHNWDTREVYPTKELEKLL
KDYSIEYGHGECIKAAICGESDKKFFAKLTSVLNTILQMRNSKTGTELDYLISPVADVNGNF
FDSRQAPKNMPQDAAANGAYHIGLKGLMLLGRIKNNQEGKKLNLVIKNEEYFEFVQNRNN
Francisella novicida Cpf1 E1006A/D1255A (D917, A1006, and A1255 are
bolded and underlined)
MSIYQEFVNKYSLSKTLRFELIPQGKTLENIKARGLILDDEKRAKDYKKAKQIIDKYHQFFI
EEILSSVCISEDLLQNYSDVYFKLKKSDDDNLQKDFKSAKDTIKKQISEYIKDSEKFKNLFN
QNLIDAKKGQESDLILWLKQSKDNGIELFKANSDITDIDEALEIIKSFKGWTTYFKGFHENR
KNVYSSNDIPTSIIYRIVDDNLPKFLENKAKYESLKDKAPEAINYEQIKKDLAEELTFDIDY
KTSEVNQRVFSLDEVFEIANFNNYLNQSGITKFNTIIGGKFVNGENTKRKGINEYINLYSQQ
INDKTLKKYKMSVLFKQILSDTESKSFVIDKLEDDSDVVTTMQSFYEQIAAFKTVEEKSIKE
TLSLLFDDLKAQKLDLSKIYFKNDKSLTDLSQQVFDDYSVIGTAVLEYITQQIAPKNLDNPS
KKEQELIAKKTEKAKYLSLETIKLALEEFNKHRDIDKQCRFEEILANFAAIPMIFDEIAQNK
DNLAQISIKYQNQGKKDLLQASAEDDVKAIKDLLDQTNNLLHKLKIFHISQSEDKANILDKD
EHFYLVFEECYFELANIVPLYNKIRNYITQKPYSDEKFKLNFENSTLANGWDKNKEPDNTAI
LFIKDDKYYLGVMNKKNNKIFDDKAIKENKGEGYKKIVYKLLPGANKMLPKVFFSAKSIKFY
NPSEDILRIRNHSTHTKNGSPQKGYEKFEFNIEDCRKFIDFYKQSISKHPEWKDFGFRFSDT
QRYNSIDEFYREVENQGYKLTFENISESYIDSVVNQGKLYLFQIYNKDFSAYSKGRPNLHTL
YWKALFDERNLQDVVYKLNGEAELFYRKQSIPKKITHPAKEAIANKNKDNPKKESVFEYDLI
KDKRFTEDKFFFHCPITINFKSSGANKFNDEINLLLKEKANDVHILSIDRGERHLAYYTLVD
GKGNIIKQDTFNIIGNDRMKTNYHDKLAAIEKDRDSARKDWKKINNIKEMKEGYLSQVVHEI
AKLVIEYNAIVVFADLNFGFKRGRFKVEKQVYQKLEKMLIEKLNYLVFKDNEFDKTGGVLRA
YQLTAPFETFKKMGKQTGIIYYVPAGFTSKICPVTGFVNQLYPKYESVSKSQEFFSKFDKIC
YNLDKGYFEFSFDYKNFGDKAAKGKWTIASFGSRLINFRNSDKNHNWDTREVYPTKELEKLL
KDYSIEYGHGECIKAAICGESDKKFFAKLTSVLNTILQMRNSKTGTELDYLISPVADVNGNF
FDSRQAPKNMPQDAAANGAYHIGLKGLMLLGRIKNNQEGKKLNLVIKNEEYFEFVQNRNN
Francisella novicida Cpf1 D917A/E1006A/D1255A (A917, A1006, and A1255
are bolded and underlined)
MSIYQEFVNKYSLSKTLRFELIPQGKTLENIKARGLILDDEKRAKDYKKAKQIIDKYHQFFI
EEILSSVCISEDLLQNYSDVYFKLKKSDDDNLQKDFKSAKDTIKKQISEYIKDSEKFKNLFN
QNLIDAKKGQESDLILWLKQSKDNGIELFKANSDITDIDEALEIIKSFKGWTTYFKGFHENR
KNVYSSNDIPTSIIYRIVDDNLPKFLENKAKYESLKDKAPEAINYEQIKKDLAEELTFDIDY
KTSEVNQRVFSLDEVFEIANFNNYLNQSGITKFNTIIGGKFVNGENTKRKGINEYINLYSQQ
INDKTLKKYKMSVLFKQILSDTESKSFVIDKLEDDSDVVTTMQSFYEQIAAFKTVEEKSIKE
TLSLLFDDLKAQKLDLSKIYFKNDKSLTDLSQQVFDDYSVIGTAVLEYITQQIAPKNLDNPS
KKEQELIAKKTEKAKYLSLETIKLALEEFNKHRDIDKQCRFEEILANFAAIPMIFDEIAQNK
DNLAQISIKYQNQGKKDLLQASAEDDVKAIKDLLDQTNNLLHKLKIFHISQSEDKANILDKD
EHFYLVFEECYFELANIVPLYNKIRNYITQKPYSDEKFKLNFENSTLANGWDKNKEPDNTAI
LFIKDDKYYLGVMNKKNNKIFDDKAIKENKGEGYKKIVYKLLPGANKMLPKVFFSAKSIKFY
NPSEDILRIRNHSTHTKNGSPQKGYEKFEFNIEDCRKFIDFYKQSISKHPEWKDFGFRFSDT
QRYNSIDEFYREVENQGYKLTFENISESYIDSVVNQGKLYLFQIYNKDFSAYSKGRPNLHTL
YWKALFDERNLQDVVYKLNGEAELFYRKQSIPKKITHPAKEAIANKNKDNPKKESVFEYDLI
KDKRFTEDKFFFHCPITINFKSSGANKFNDEINLLLKEKANDVHILSIARGERHLAYYTLVD
GKGNIIKQDTFNIIGNDRMKTNYHDKLAAIEKDRDSARKDWKKINNIKEMKEGYLSQVVHEI
AKLVIEYNAIVVFADLNFGFKRGRFKVEKQVYQKLEKMLIEKLNYLVFKDNEFDKTGGVLRA
YQLTAPFETFKKMGKQTGIIYYVPAGFTSKICPVTGFVNQLYPKYESVSKSQEFFSKFDKIC
YNLDKGYFEFSFDYKNFGDKAAKGKWTIASFGSRLINFRNSDKNHNWDTREVYPTKELEKLL
KDYSIEYGHGECIKAAICGESDKKFFAKLTSVLNTILQMRNSKTGTELDYLISPVADVNGNF
FDSRQAPKNMPQDAAANGAYHIGLKGLMLLGRIKNNQEGKKLNLVIKNEEYFEFVQNRNN

[0289] In some embodiments, one of the Cas9 domains present in the fusion protein may be replaced with a guide nucleotide sequence-programmable DNA-binding protein domain that has no requirements for a PAM sequence.

[0290] In some embodiments, the Cas9 domain is a Cas9 domain from Staphylococcus aureus (SaCas9). In some embodiments, the SaCas9 domain is a nuclease active SaCas9, a nuclease inactive SaCas9 (SaCas9d), or a SaCas9 nickase (SaCas9n). In some embodiments, the SaCas9 comprises a N579A mutation, or a corresponding mutation in any of the amino acid sequences provided herein.

[0291] In some embodiments, the SaCas9 domain, the SaCas9d domain, or the SaCas9n domain can bind to a nucleic acid sequence having a non-canonical PAM. In some embodiments, the SaCas9 domain, the SaCas9d domain, or the SaCas9n domain can bind to a nucleic acid sequence having a NNGRRT or a NNGRRT PAM sequence. In some embodiments, the SaCas9 domain comprises one or more of a E781X, a N967X, and a R1014X mutation, or a corresponding mutation in any of the amino acid sequences provided herein, wherein X is any amino acid. In some embodiments, the SaCas9 domain comprises one or more of a E781K, a N967K, and a R1014H mutation, or one or more corresponding mutation in any of the amino acid sequences provided herein. In some embodiments, the SaCas9 domain comprises a E781K, a N967K, or a R1014H mutation, or corresponding mutations in any of the amino acid sequences provided herein.

Exemplary SaCas9 sequence
KRNYILGLDIGITSVGYGIIDYETRDVIDAGVRLFKEANVENNEGRRSKRGARRLKRRRRHR
IQRVKKLLFDYNLLTDHSELSGINPYEARVKGLSQKLSEEEFSAALLHLAKRRGVHNVNEVE
EDTGNELSTKEQISRNSKALEEKYVAELQLERLKKDGEVRGSINRFKTSDYVKEAKQLLKVQ
KAYHQLDQSFIDTYIDLLETRRTYYEGPGEGSPFGWKDIKEWYEMLMGHCTYFPEELRSVKY
AYNADLYNALNDLNNLVITRDENEKLEYYEKFQIIENVFKQKKKPTLKQIAKEILVNEEDIK
GYRVTSTGKPEFTNLKVYHDIKDITARKEIIENAELLDQIAKILTIYQSSEDIQEELTNLNS
ELTQEEIEQISNLKGYTGTHNLSLKAINLILDELWHTNDNQIAIFNRLKLVPKKVDLSQQKE
IPTTLVDDFILSPVVKRSFIQSIKVINAIIKKYGLPNDIIIELAREKNSKDAQKMINEMQKR
NRQTNERIEEIIRTTGKENAKYLIEKIKLHDMQEGKCLYSLEAIPLEDLLNNPFNYEVDHII
PRSVSFDNSFNNKVLVKQEENSKKGNRTPFQYLSSSDSKISYETFKKHILNLAKGKGRISKI
KKEYLLEERDINRFSVQKDFINRNLVDTRYATRGLMNLLRSYFRVNNLDVKVKSINGGFTSF
LRRKWKFKKERNKGYKHHAEDALIIANADFIFKEWKKLDKAKKVMENQMFEEKQAESMPEIE
TEQEYKEIFITPHQIKHIKDFKDYKYSHRVDKKPNRELINDTLYSTRKDDKGNTLIVNNLNG
LYDKDNDKLKKLINKSPEKLLMYHHDPQTYQKLKLIMEQYGDEKNPLYKYYEETGNYLTKYS
KKDNGPVIKKIKYYGNKLNAHLDITDDYPNSRNKVVKLSLKPYRFDVYLDNGVYKFVTVKNL
DVIKKENYYEVNSKCYEEAKKLKKISNQAEFIASFYNNDLIKINGELYRVIGVNNDLLNRIE
VNMIDITYREYLENMNDKRPPRIIKTIASKTQSIKKYSTDILGNLYEVKSKKHPQIIKKG

[0292] Residue N579 above, which is underlined and in bold, may be mutated (e.g., to a A579) to yield a SaCas9 nickase.

Exemplary SaCas9n sequence
KRNYILGLDIGITSVGYGIIDYETRDVIDAGVRLFKEANVENNEGRRSKRGARRLKRRRRHR
IQRVKKLLFDYNLLTDHSELSGINPYEARVKGLSQKLSEEEFSAALLHLAKRRGVHNVNEVE
EDTGNELSTKEQISRNSKALEEKYVAELQLERLKKDGEVRGSINRFKTSDYVKEAKQLLKVQ
KAYHQLDQSFIDTYIDLLETRRTYYEGPGEGSPFGWKDIKEWYEMLMGHCTYFPEELRSVKY
AYNADLYNALNDLNNLVITRDENEKLEYYEKFQIIENVFKQKKKPTLKQIAKEILVNEEDIK
GYRVTSTGKPEFTNLKVYHDIKDITARKEIIENAELLDQIAKILTIYQSSEDIQEELTNLNS
ELTQEEIEQISNLKGYTGTHNLSLKAINLILDELWHTNDNQIAIFNRLKLVPKKVDLSQQKE
IPTTLVDDFILSPVVKRSFIQSIKVINAIIKKYGLPNDIIIELAREKNSKDAQKMINEMQKR
NRQTNERIEEIIRTTGKENAKYLIEKIKLHDMQEGKCLYSLEAIPLEDLLNNPFNYEVDHII
PRSVSFDNSFNNKVLVKQEEASKKGNRTPFQYLSSSDSKISYETFKKHILNLAKGKGRISKI
KKEYLLEERDINRFSVQKDFINRNLVDTRYATRGLMNLLRSYFRVNNLDVKVKSINGGFTSF
LRRKWKFKKERNKGYKHHAEDALIIANADFIFKEWKKLDKAKKVMENQMFEEKQAESMPEIE
TEQEYKEIFITPHQIKHIKDFKDYKYSHRVDKKPNRELINDTLYSTRKDDKGNTLIVNNLNG
LYDKDNDKLKKLINKSPEKLLMYHHDPQTYQKLKLIMEQYGDEKNPLYKYYEETGNYLTKYS
KKDNGPVIKKIKYYGNKLNAHLDITDDYPNSRNKVVKLSLKPYRFDVYLDNGVYKFVTVKNL
DVIKKENYYEVNSKCYEEAKKLKKISNQAEFIASFYNNDLIKINGELYRVIGVNNDLLNRIE
VNMIDITYREYLENMNDKRPPRIIKTIASKTQSIKKYSTDILGNLYEVKSKKHPQIIKKG

[0293] Residue A579 above, which can be mutated from N579 to yield a SaCas9 nickase, is underlined and in bold.

Exemplary SaKKH Cas9
KRNYILGLDIGITSVGYGIIDYETRDVIDAGVRLFKEANVENNEGRRSKRGARRLKRRRRHR
IQRVKKLLFDYNLLTDHSELSGINPYEARVKGLSQKLSEEEFSAALLHLAKRRGVHNVNEVE
EDTGNELSTKEQISRNSKALEEKYVAELQLERLKKDGEVRGSINRFKTSDYVKEAKQLLKVQ
KAYHQLDQSFIDTYIDLLETRRTYYEGPGEGSPFGWKDIKEWYEMLMGHCTYFPEELRSVKY
AYNADLYNALNDLNNLVITRDENEKLEYYEKFQIIENVFKQKKKPTLKQIAKEILVNEEDIK
GYRVTSTGKPEFTNLKVYHDIKDITARKEIIENAELLDQIAKILTIYQSSEDIQEELTNLNS
ELTQEEIEQISNLKGYTGTHNLSLKAINLILDELWHTNDNQIAIFNRLKLVPKKVDLSQQKE
IPTTLVDDFILSPVVKRSFIQSIKVINAIIKKYGLPNDIIIELAREKNSKDAQKMINEMQKR
NRQTNERIEEIIRTTGKENAKYLIEKIKLHDMQEGKCLYSLEAIPLEDLLNNPFNYEVDHII
PRSVSFDNSFNNKVLVKQEEASKKGNRTPFQYLSSSDSKISYETFKKHILNLAKGKGRISKI
KKEYLLEERDINRFSVQKDFINRNLVDTRYATRGLMNLLRSYFRVNNLDVKVKSINGGFTSF
LRRKWKFKKERNKGYKHHAEDALIIANADFIFKEWKKLDKAKKVMENQMFEEKQAESMPEIE
TEQEYKEIFITPHQIKHIKDFKDYKYSHRVDKKPNRKLINDTLYSTRKDDKGNTLIVNNLNG
LYDKDNDKLKKLINKSPEKLLMYHHDPQTYQKLKLIMEQYGDEKNPLYKYYEETGNYLTKYS
KKDNGPVIKKIKYYGNKLNAHLDITDDYPNSRNKVVKLSLKPYRFDVYLDNGVYKFVTVKNL
DVIKKENYYEVNSKCYEEAKKLKKISNQAEFIASFYKNDLIKINGELYRVIGVNNDLLNRIE
VNMIDITYREYLENMNDKRPPHIIKTIASKTQSIKKYSTDILGNLYEVKSKKHPQIIKKG.

[0294] Residue A579 above, which can be mutated from N579 to yield a SaCas9 nickase, is underlined and in bold. Residues K781, K967, and H1014 above, which can be mutated from E781, N967, and R1014 to yield a SaKKH Cas9 are underlined and in italics.

[0295] In some embodiments, the napDNAbp is a circular permutant. In the following sequences, the plain text denotes an adenosine deaminase sequence, bold sequence indicates sequence derived from Cas9, the italicized sequence denotes a linker sequence, and the underlined sequence denotes a bipartite nuclear localization sequence.

CP5 (with MSP “NGC” PID and “D10A” nickase):
EIGKATAKYFFYSNIMNFFKTEITLANGEIRKRPLIETNGETGEIVWDKGRDFATVRKVLSM
PQVNIVKKTEVQTGGFSKESILPKRNSDKLIARKKDWDPKKYGGFMQPTVAYSVLVVAKVEK
GKSKKLKSVKELLGITIMERSSFEKNPIDFLEAKGYKEVKKDLIIKLPKYSLFELENGRKRM
LASAKFLQKGNELALPSKYVNFLYLASHYEKLKGSPEDNEQKQLFVEQHKHYLDEIIEQISE
FSKRVILADANLDKVLSAYNKHRDKPIREQAENIIHLFTLTNLGAPRAFKYFDTTIARKEYR
STKEVLDATLIHQSITGLYETRIDLSQLGGDGGSGGSGGSGGSGGSGGSGGMDKKYSIGLAI
GTNSVGWAVITDEYKVPSKKFKVLGNTDRHSIKKNLIGALLFDSGETAEATRLKRTARRRYT
RRKNRICYLQEIFSNEMAKVDDSFFHRLEESFLVEEDKKHERHPIFGNIVDEVAYHEKYPTI
YHLRKKLVDSTDKADLRLIYLALAHMIKFRGHFLIEGDLNPDNSDVDKLFIQLVQTYNQLFE
ENPINASGVDAKAILSARLSKSRRLENLIAQLPGEKKNGLFGNLIALSLGLTPNFKSNFDLA
EDAKLQLSKDTYDDDLDNLLAQIGDQYADLFLAAKNLSDAILLSDILRVNTEITKAPLSASM
IKRYDEHHQDLTLLKALVRQQLPEKYKEIFFDQSKNGYAGYIDGGASQEEFYKFIKPILEKM
DGTEELLVKLNREDLLRKQRTFDNGSIPHQIHLGELHAILRRQEDFYPFLKDNREKIEKILT
FRIPYYVGPLARGNSRFAWMTRKSEETITPWNFEEVVDKGASAQSFIERMTNFDKNLPNEKV
LPKHSLLYEYFTVYNELTKVKYVTEGMRKPAFLSGEQKKAIVDLLFKTNRKVTVKQLKEDYF
KKIECFDSVEISGVEDRFNASLGTYHDLLKIIKDKDFLDNEENEDILEDIVLTLTLFEDREM
IEERLKTYAHLFDDKVMKQLKRRRYTGWGRLSRKLINGIRDKQSGKTILDFLKSDGFANRNF
MQLIHDDSLTFKEDIQKAQVSGQGDSLHEHIANLAGSPAIKKGILQTVKVVDELVKVMGRHK
PENIVIEMARENQTTQKGQKNSRERMKRIEEGIKELGSQILKEHPVENTQLQNEKLYLYYLQ
NGRDMYVDQELDINRLSDYDVDHIVPQSFLKDDSIDNKVLTRSDKNRGKSDNVPSEEVVKKM
KNYWRQLLNAKLITQRKFDNLTKAERGGLSELDKAGFIKRQLVETRQITKHVAQILDSRMNT
KYDENDKLIREVKVITLKSKLVSDFRKDFQFYKVREINNYHHAHDAYLNAVVGTALIKKYPK
LESEFVYGDYKVYDVRKMIAKSEQEGADKRTADGSEFESPKKKRKV*

[0296] In some embodiments, the nucleic acid programmable DNA binding protein (napDNAbp) is a single effector of a microbial CRISPR-Cas system. Single effectors of microbial CRISPR-Cas systems include, without limitation, Cas9, Cpf1, Cas12b/C2c1, and Cas12c/C2c3. Typically, microbial CRISPR-Cas systems are divided into Class 1 and Class 2 systems. Class 1 systems have multisubunit effector complexes, while Class 2 systems have a single protein effector. For example, Cas9 and Cpf1 are Class 2 effectors. In addition to Cas9 and Cpf1, three distinct Class 2 CRISPR-Cas systems (Cas12b/C2c1, and Cas12c/C2c3) have been described by Shmakov et al., “Discovery and Functional Characterization of Diverse Class 2 CRISPR Cas Systems”, Mol. Cell, 2015 Nov. 5; 60(3): 385-397, the entire contents of which is hereby incorporated by reference. Effectors of two of the systems, Cas12b/C2c1, and Cas12c/C2c3, contain RuvC-like endonuclease domains related to Cpf1. A third system, contains an effector with two predicated HEPN RNase domains. Production of mature CRISPR RNA is tracrRNA-independent, unlike production of CRISPR RNA by Cas12b/C2c1. Cas12b/C2c1 depends on both CRISPR RNA and tracrRNA for DNA cleavage.

[0297] The crystal structure of Alicyclobaccillus acidoterrastris Cas12b/C2c1 (AacC2c1) has been reported in complex with a chimeric single-molecule guide RNA (sgRNA). See e.g., Liu et al., “C2c1-sgRNA Complex Structure Reveals RNA-Guided DNA Cleavage Mechanism”, Mol. Cell, 2017 Jan. 19; 65(2):310-322, the entire contents of which are hereby incorporated by reference. The crystal structure has also been reported in Alicyclobacillus acidoterrestris C2c1 bound to target DNAs as ternary complexes. See e.g., Yang et al., “PAM-dependent Target DNA Recognition and Cleavage by C2C1 CRISPR-Cas endonuclease”, Cell, 2016 Dec. 15; 167(7):1814-1828, the entire contents of which are hereby incorporated by reference. Catalytically competent conformations of AacC2c1, both with target and non-target DNA strands, have been captured independently positioned within a single RuvC catalytic pocket, with Cas12b/C2c1-mediated cleavage resulting in a staggered seven-nucleotide break of target DNA. Structural comparisons between Cas12b/C2c1 ternary complexes and previously identified Cas9 and Cpf1 counterparts demonstrate the diversity of mechanisms used by CRISPR-Cas9 systems.

[0298] In some embodiments, the nucleic acid programmable DNA binding protein (napDNAbp) of any of the fusion proteins provided herein may be a Cas12b/C2c1, or a Cas12c/C2c3 protein. In some embodiments, the napDNAbp is a Cas12b/C2c1 protein. In some embodiments, the napDNAbp is a Cas12c/C2c3 protein. In some embodiments, the napDNAbp comprises an amino acid sequence that is at least 85%, at least 90%, at least 91%, at least 92%, at least 93%, at least 94%, at least 95%, at least 96%, at least 97%, at least 98%, at least 99%, or at ease 99.5% identical to a naturally-occurring Cas12b/C2c1 or Cas12c/C2c3 protein. In some embodiments, the napDNAbp is a naturally-occurring Cas12b/C2c1 or Cas12c/C2c3 protein. In some embodiments, the napDNAbp comprises an amino acid sequence that is at least 85%, at least 90%, at least 91%, at least 92%, at least 93%, at least 94%, at least 95%, at least 96%, at least 97%, at least 98%, at least 99%, or at ease 99.5% identical to any one of the napDNAbp sequences provided herein. It should be appreciated that Cas12b/C2c1 or Cas12c/C2c3 from other bacterial species may also be used in accordance with the present disclosure.

[0299] A Cas12b/C2c1 ((uniprot.org/uniprot/TOD7A2#2) sp|T0D7A2|C2C1_ALIAG CRISPR-associated endonuclease C2c1 OS=Alicyclobacillus acido-terrestris (strain ATCC 49025/DSM 3922/CIP 106132/NCIMB 13137/GD3B) GN=c2c1 PE=1 SV=1) amino acid sequence is as follows:

MAVKSIKVKLRLDDMPEIRAGLWKLHKEVNAGVRYYTEWLSLLRQENLYRRSPNGDGEQECD
KTAEECKAELLERLRARQVENGHRGPAGSDDELLQLARQLYELLVPQAIGAKGDAQQIARKF
LSPLADKDAVGGLGIAKAGNKPRWVRMREAGEPGWEEEKEKAETRKSADRTADVLRALADFG
LKPLMRVYTDSEMSSVEWKPLRKGQAVRTWDRDMFQQAIERMMSWESWNQRVGQEYAKLVEQ
KNRFEQKNFVGQEHLVHLVNQLQQDMKEASPGLESKEQTAHYVTGRALRGSDKVFEKWGKLA
PDAPFDLYDAEIKNVQRRNTRRFGSHDLFAKLAEPEYQALWREDASFLTRYAVYNSILRKLN
HAKMFATFTLPDATAHPIWTRFDKLGGNLHQYTFLFNEFGERRHAIRFHKLLKVENGVAREV
DDVTVPISMSEQLDNLLPRDPNEPIALYFRDYGAEQHFTGEFGGAKIQCRRDQLAHMHRRRG
ARDVYLNVSVRVQSQSEARGERRPPYAAVFRLVGDNHRAFVHFDKLSDYLAEHPDDGKLGSE
GLLSGLRVMSVDLGLRTSASISVFRVARKDELKPNSKGRVPFFFPIKGNDNLVAVHERSQLL
KLPGETESKDLRAIREERQRTLRQLRTQLAYLRLLVRCGSEDVGRRERSWAKLIEQPVDAAN
HMTPDWREAFENELQKLKSLHGICSDKEWMDAVYESVRRVWRHMGKQVRDWRKDVRSGERPK
IRGYAKDVVGGNSIEQIEYLERQYKFLKSWSFFGKVSGQVIRAEKGSRFAITLREHIDHAKE
DRLKKLADRIIMEALGYVYALDERGKGKWVAKYPPCQLILLEELSEYQFNNDRPPSENNQLM
QWSHRGVFQELINQAQVHDLLVGTMYAAFSSRFDARTGAPGIRCRRVPARCTQEHNPEPFPW
WLNKFVVEHTLDACPLRADDLIPTGEGEIFVSPFSAEEGDFHQIHADLNAAQNLQQRLWSDF
DISQIRLRCDWGEVDGELVLIPRLTGKRTADSYSNKVFYTNTGVTYYERERGKKRRKVFAQE
KLSEEEAELLVEADEAREKSVVLMRDPSGIINRGNWTRQKEFWSMV NQRIEGYLVKQIRSR
VPLQDSACENTGDI
AacCas12b (Alicyclobacillus acidiphilus)-WP_067623834
MAVKSMKVKLRLDNMPEIRAGLWKLHTEVNAGVRYYTEWLSLLRQENLYRRSPNGDGEQECY
KTAEECKAELLERLRARQVENGHCGPAGSDDELLQLARQLYELLVPQAIGAKGDAQQIARKF
LSPLADKDAVGGLGIAKAGNKPRWVRMREAGEPGWEEEKAKAEARKSTDRTADVLRALADFG
LKPLMRVYTDSDMSSVQWKPLRKGQAVRTWDRDMFQQAIERMMSWESWNQRVGEAYAKLVEQ
KSRFEQKNFVGQEHLVQLVNQLQQDMKEASHGLESKEQTAHYLTGRALRGSDKVFEKWEKLD
PDAPFDLYDTEIKNVQRRNTRRFGSHDLFAKLAEPKYQALWREDASFLTRYAVYNSIVRKLN
HAKMFATFTLPDATAHPIWTRFDKLGGNLHQYTFLFNEFGEGRHAIRFQKLLTVEDGVAKEV
DDVTVPISMSAQLDDLLPRDPHELVALYFQDYGAEQHLAGEFGGAKIQYRRDQLNHLHARRG
ARDVYLNLSVRVQSQSEARGERRPPYAAVFRLVGDNHRAFVHFDKLSDYLAEHPDDGKLGSE
GLLSGLRVMSVDLGLRTSASISVFRVARKDELKPNSEGRVPFCFPIEGNENLVAVHERSQLL
KLPGETESKDLRAIREERQRTLRQLRTQLAYLRLLVRCGSEDVGRRERSWAKLIEQPMDANQ
MTPDWREAFEDELQKLKSLYGICGDREWTEAVYESVRRVWRHMGKQVRDWRKDVRSGERPKI
RGYQKDVVGGNSIEQIEYLERQYKFLKSWSFFGKVSGQVIRAEKGSRFAITLREHIDHAKED
RLKKLADRIIMEALGYVYALDDERGKGKWVAKYPPCQLILLEELSEYQFNNDRPPSENNQLM
QWSHRGVFQELLNQAQVHDLLVGTMYAAFSSRFDARTGAPGIRCRRVPARCAREQNPEPFPW
WLNKFVAEHKLDGCPLRADDLIPTGEGEFFVSPFSAEEGDFHQIHADLNAAQNLQRRLWSDF
DISQIRLRCDWGEVDGEPVLIPRTTGKRTADSYGNKVFYTKTGVTYYERERGKKRRKVFAQE
ELSEEEAELLVEADEAREKSVVLMRDPSGIINRGDWTRQKEFWSMVNQRIEGYLVKQIRSRV
RLQESACENTGDI
BhCas12b (Bacillus hisashii) NCBI Reference Sequence: WP_095142515
MAPKKKRKVGIHGVPAAATRSFILKIEPNEEVKKGLWKTHEVLNHGIAYYMNILKLIRQEAI
YEHHEQDPKNPKKVSKAEIQAELWDFVLKMQKCNSFTHEVDKDEVFNILRELYEELVPSSVE
KKGEANQLSNKFLYPLVDPNSQSGKGTASSGRKPRWYNLKIAGDPSWEEEKKKWEEDKKKDP
LAKILGKLAEYGLIPLFIPYTDSNEPIVKEIKWMEKSRNQSVRRLDKDMFIQALERFLSWES
WNLKVKEEYEKVEKEYKTLEERIKEDIQALKALEQYEKERQEQLLRDTLNTNEYRLSKRGLR
GWREIIQKWLKMDENEPSEKYLEVFKDYQRKHPREAGDYSVYEFLSKKENHFIWRNHPEYPY
LYATFCEIDKKKKDAKQQATFTLADPINHPLWVRFEERSGSNLNKYRILTEQLHTEKLKKKL
TVQLDRLIYPTESGGWEEKGKVDIVLLPSRQFYNQIFLDIEEKGKHAFTYKDESIKFPLKGT
LGGARVQFDRDHLRRYPHKVESGNVGRIYFNMTVNIEPTESPVSKSLKIHRDDFPKVVNFKP
KELTEWIKDSKGKKLKSGIESLEIGLRVMSIDLGQRQAAAASIFEVVDQKPDIEGKLFFPIK
GTELYAVHRASFNIKLPGETLVKSREVLRKAREDNLKLMNQKLNFLRNVLHFQQFEDITERE
KRVTKWISRQENSDVPLVYQDELIQIRELMYKPYKDWVAFLKQLHKRLEVEIGKEVKHWRKS
LSDGRKGLYGISLKNIDEIDRTRKFLLRWSLRPTEPGEVRRLEPGQRFAIDQLNHLNALKED
RLKKMANTIIMHALGYCYDVRKKKWQAKNPACQIILFEDLSNYNPYEERSRFENSKLMKWSR
REIPRQVALQGEIYGLQVGEVGAQFSSRFHAKTGSPGIRCSVVTKEKLQDNRFFKNLQREGR
LTLDKIAVLKEGDLYPDKGGEKFISLSKDRKCVTTHADINAAQNLQKRFWTRTHGFYKVYCK
AYQVDGQTVYIPESKDQKQKIIEEFGEGYFILKDGVYEWVNAGKLKIKKGSSKQSSSELVDS
DILKDSFDLASELKGEKLMLYRDPSGNVFPSDKWMAAGVFFGKLERILISKLTNQYSISTIE
DDSSKQSMKRPAATKKAGQAKKKK

[0300] Including the variant termed BvCas12b V4 (S893R/K846R/E837G changes rel. to wt above). BhCas12b (V4) is expressed as follows: 5′ mRNA Cap-5′UTR-bhCas12b-STOP sequence-3′UTR-120polyA tail 5′UTR:

GGGAAATAAGAGAGAAAAGAAGAGTAAGAAGAAATATAAGAGCCACC
3′ UTR (TriLink standard UTR)
GCTGGAGCCTCGGTGGCCATGCTTCTTGCCCCTTGGGCCTCCCCCCAGCCCCTCCTCCCCTT
CCTGCACCCGTACCCCCGTGGTCTTTGAATAAAGTCTGA
Nucleic acid sequence of bhCas12b (V4)
ATGGCCCCAAAGAAGAAGCGGAAGGTCGGTATCCACGGAGTCCCAGCAGCCGCCACCAGATC
CTTCATCCTGAAGATCGAGCCCAACGAGGAAGTGAAGAAAGGCCTCTGGAAAACCCACGAGG
TGCTGAACCACGGAATCGCCTACTACATGAATATCCTGAAGCTGATCCGGCAAGAGGCCATC
TACGAGCACCACGAGCAGGACCCCAAGAATCCCAAGAAGGTGTCCAAGGCCGAGATCCAGGC
CGAGCTGTGGGATTTCGTGCTGAAGATGCAGAAGTGCAACAGCTTCACACACGAGGTGGACA
AGGACGAGGTGTTCAACATCCTGAGAGAGCTGTACGAGGAACTGGTGCCCAGCAGCGTGGAA
AAGAAGGGCGAAGCCAACCAGCTGAGCAACAAGTTTCTGTACCCTCTGGTGGACCCCAACAG
CCAGTCTGGAAAGGGAACAGCCAGCAGCGGCAGAAAGCCCAGATGGTACAACCTGAAGATTG
CCGGCGATCCCTCCTGGGAAGAAGAGAAGAAGAAGTGGGAAGAAGATAAGAAAAAGGACCCG
CTGGCCAAGATCCTGGGCAAGCTGGCTGAGTACGGACTGATCCCTCTGTTCATCCCCTACAC
CGACAGCAACGAGCCCATCGTGAAAGAAATCAAGTGGATGGAAAAGTCCCGGAACCAGAGCG
TGCGGCGGCTGGATAAGGACATGTTCATTCAGGCCCTGGAACGGTTCCTGAGCTGGGAGAGC
TGGAACCTGAAAGTGAAAGAGGAATACGAGAAGGTCGAGAAAGAGTACAAGACCCTGGAAGA
GAGGATCAAAGAGGACATCCAGGCTCTGAAGGCTCTGGAACAGTATGAGAAAGAGCGGCAAG
AACAGCTGCTGCGGGACACCCTGAACACCAACGAGTACCGGCTGAGCAAGAGAGGCCTTAGA
GGCTGGCGGGAAATCATCCAGAAATGGCTGAAAATGGACGAGAACGAGCCCTCCGAGAAGTA
CCTGGAAGTGTTCAAGGACTACCAGCGGAAGCACCCTAGAGAGGCCGGCGATTACAGCGTGT
ACGAGTTCCTGTCCAAGAAAGAGAACCACTTCATCTGGCGGAATCACCCTGAGTACCCCTAC
CTGTACGCCACCTTCTGCGAGATCGACAAGAAAAAGAAGGACGCCAAGCAGCAGGCCACCTT
CACACTGGCCGATCCTATCAATCACCCTCTGTGGGTCCGATTCGAGGAAAGAAGCGGCAGCA
ACCTGAACAAGTACAGAATCCTGACCGAGCAGCTGCACACCGAGAAGCTGAAGAAAAAGCTG
ACAGTGCAGCTGGACCGGCTGATCTACCCTACAGAATCTGGCGGCTGGGAAGAGAAGGGCAA
AGTGGACATTGTGCTGCTGCCCAGCCGGCAGTTCTACAACCAGATCTTCCTGGACATCGAGG
AAAAGGGCAAGCACGCCTTCACCTACAAGGATGAGAGCATCAAGTTCCCTCTGAAGGGCACA
CTCGGCGGAGCCAGAGTGCAGTTCGACAGAGATCACCTGAGAAGATACCCTCACAAGGTGGA
AAGCGGCAACGTGGGCAGAATCTACTTCAACATGACCGTGAACATCGAGCCTACAGAGTCCC
CAGTGTCCAAGTCTCTGAAGATCCACCGGGACGACTTCCCCAAGGTGGTCAACTTCAAGCCC
AAAGAACTGACCGAGTGGATCAAGGACAGCAAGGGCAAGAAACTGAAGTCCGGCATCGAGTC
CCTGGAAATCGGCCTGAGAGTGATGAGCATCGACCTGGGACAGAGACAGGCCGCTGCCGCCT
CTATTTTCGAGGTGGTGGATCAGAAGCCCGACATCGAAGGCAAGCTGTTTTTCCCAATCAAG
GGCACCGAGCTGTATGCCGTGCACAGAGCCAGCTTCAACATCAAGCTGCCCGGCGAGACACT
GGTCAAGAGCAGAGAAGTGCTGCGGAAGGCCAGAGAGGACAATCTGAAACTGATGAACCAGA
AGCTCAACTTCCTGCGGAACGTGCTGCACTTCCAGCAGTTCGAGGACATCACCGAGAGAGAG
AAGCGGGTCACCAAGTGGATCAGCAGACAAGAGAACAGCGACGTGCCCCTGGTGTACCAGGA
TGAGCTGATCCAGATCCGCGAGCTGATGTACAAGCCTTACAAGGACTGGGTCGCCTTCCTGA
AGCAGCTCCACAAGAGACTGGAAGTCGAGATCGGCAAAGAAGTGAAGCACTGGCGGAAGTCC
CTGAGCGACGGAAGAAAGGGCCTGTACGGCATCTCCCTGAAGAACATCGACGAGATCGATCG
GACCCGGAAGTTCCTGCTGAGATGGTCCCTGAGGCCTACCGAACCTGGCGAAGTGCGTAGAC
TGGAACCCGGCCAGAGATTCGCCATCGACCAGCTGAATCACCTGAACGCCCTGAAAGAAGAT
CGGCTGAAGAAGATGGCCAACACCATCATCATGCACGCCCTGGGCTACTGCTACGACGTGCG
GAAGAAGAAATGGCAGGCTAAGAACCCCGCCTGCCAGATCATCCTGTTCGAGGATCTGAGCA
ACTACAACCCCTACGAGGAAAGGTCCCGCTTCGAGAACAGCAAGCTCATGAAGTGGTCCAGA
CGCGAGATCCCCAGACAGGTTGCACTGCAGGGCGAGATCTATGGCCTGCAAGTGGGAGAAGT
GGGCGCTCAGTTCAGCAGCAGATTCCACGCCAAGACAGGCAGCCCTGGCATCAGATGTAGCG
TCGTGACCAAAGAGAAGCTGCAGGACAATCGGTTCTTCAAGAATCTGCAGAGAGAGGGCAGA
CTGACCCTGGACAAAATCGCCGTGCTGAAAGAGGGCGATCTGTACCCAGACAAAGGCGGCGA
GAAGTTCATCAGCCTGAGCAAGGATCGGAAGTGCGTGACCACACACGCCGACATCAACGCCG
CTCAGAACCTGCAGAAGCGGTTCTGGACAAGAACCCACGGCTTCTACAAGGTGTACTGCAAG
GCCTACCAGGTGGACGGCCAGACCGTGTACATCCCTGAGAGCAAGGACCAGAAGCAGAAGAT
CATCGAAGAGTTCGGCGAGGGCTACTTCATTCTGAAGGACGGGGTGTACGAATGGGTCAACG
CCGGCAAGCTGAAAATCAAGAAGGGCAGCTCCAAGCAGAGCAGCAGCGAGCTGGTGGATAGC
GACATCCTGAAAGACAGCTTCGACCTGGCCTCCGAGCTGAAAGGCGAAAAGCTGATGCTGTA
CAGGGACCCCAGCGGCAATGTGTTCCCCAGCGACAAATGGATGGCCGCTGGCGTGTTCTTCG
GAAAGCTGGAACGCATCCTGATCAGCAAGCTGACCAACCAGTACTCCATCAGCACCATCGAG
GACGACAGCAGCAAGCAGTCTATGAAAAGGCCGGCGGCCACGAAAAAGGCCGGCCAGGCAAA
AAAGAAAAAG

[0301] In some embodiments, the Cas12b is BvCas12B. In some embodiments, the Cas12b comprises amino acid substitutions S893R, K846R, and E837G as numbered in BvCas12B exemplary sequence provided below.

BvCas12b (Bacillus sp. V3-13) NCBI Reference Sequence: WP_101661451.1
MAIRSIKLKMKTNSGTDSIYLRKALWRTHQLINEGIAYYMNLLTLYRQEAIGDKTKEAYQAE
LINIIRNQQRNNGSSEEHGSDQEILALLRQLYELIIPSSIGESGDANQLGNKFLYPLVDPNS
QSGKGTSNAGRKPRWKRLKEEGNPDWELEKKKDEERKAKDPTVKIFDNLNKYGLLPLFPLFT
NIQKDIEWLPLGKRQSVRKWDKDMFIQAIERLLSWESWNRRVADEYKQLKEKTESYYKEHLT
GGEEWIEKIRKFEKERNMELEKNAFAPNDGYFITSRQIRGWDRVYEKWSKLPESASPEELWK
VVAEQQNKMSEGFGDPKVFSFLANRENRDIWRGHSERIYHIAAYNGLQKKLSRTKEQATFTL
PDAIEHPLWIRYESPGGTNLNLFKLEEKQKKNYYVTLSKIIWPSEEKWIEKENIEIPLAPSI
QFNRQIKLKQHVKGKQEISFSDYSSRISLDGVLGGSRIQFNRKYIKNHKELLGEGDIGPVFF
NLVVDVAPLQETRNGRLQSPIGKALKVISSDFSKVIDYKPKELMDWMNTGSASNSFGVASLL
EGMRVMSIDMGQRTSASVSIFEVVKELPKDQEQKLFYSINDTELFAIHKRSFLLNLPGEVVT
KNNKQQRQERRKKRQFVRSQIRMLANVLRLETKKTPDERKKAIHKLMEIVQSYDSWTASQKE
VWEKELNLLTNMAAFNDEIWKESLVELHHRIEPYVGQIVSKWRKGLSEGRKNLAGISMWNID
ELEDTRRLLISWSKRSRTPGEANRIETDEPFGSSLLQHIQNVKDDRLKQMANLIIMTALGFK
YDKEEKDRYKRWKETYPACQIILFENLNRYLFNLDRSRRENSRLMKWAHRSIPRTVSMQGEM
FGLQVGDVRSEYSSRFHAKTGAPGIRCHALTEEDLKAGSNTLKRLIEDGFINESELAYLKKG
DIIPSQGGELFVTLSKRYKKDSDNNELTVIHADINAAQNLQKRFWQQNSEVYRVPCQLARMG
EDKLYIPKSQTETIKKYFGKGSFVKNNTEQEVYKWEKSEKMKIKTDTTFDLQDLDGFEDISK
TIELAQEQQKKYLTMFRDPSGYFFNNETWRPQKEYWSIVNNIIKSCLKKKILSNKVEL
In some embodiments, the Cas12b is BTCas12b.BTCas12b (Bacillus
thermoamylovorans) NCBI Reference Sequence: WP_041902512
MATRSFILKIEPNEEVKKGLWKTHEVLNHGIAYYMNILKLIRQEAIYEHHEQDPKNPKKV
SKAEIQAELWDFVLKMQKCNSFTHEVDKDVVFNILRELYEELVPSSVEKKGEANQLSNKF
LYPLVDPNSQSGKGTASSGRKPRWYNLKIAGDPSWEEEKKKWEEDKKKDPLAKILGKLAE
YGLIPLFIPFTDSNEPIVKEIKWMEKSRNQSVRRLDKDMFIQALERFLSWESWNLKVKEE
YEKVEKEHKTLEERIKEDIQAFKSLEQYEKERQEQLLRDTLNTNEYRLSKRGLRGWREII
QKWLKMDENEPSEKYLEVFKDYQRKHPREAGDYSVYEFLSKKENHFIWRNHPEYPYLYAT
FCEIDKKKKDAKQQATFTLADPINHPLWVRFEERSGSNLNKYRILTEQLHTEKLKKKLTV
QLDRLIYPTESGGWEEKGKVDIVLLPSRQFYNQIFLDIEEKGKHAFTYKDESIKFPLKGT
LGGARVQFDRDHLRRYPHKVESGNVGRIYFNMTVNIEPTESPVSKSLKIHRDDFPKFVNF
KPKELTEWIKDSKGKKLKSGIESLEIGLRVMSIDLGQRQAAAASIFEVVDQKPDIEGKLF
FPIKGTELYAVHRASFNIKLPGETLVKSREVLRKAREDNLKLMNQKLNFLRNVLHFQQFE
DITEREKRVTKWISRQENSDVPLVYQDELIQIRELMYKPYKDWVAFLKQLHKRLEVEIGK
EVKHWRKSLSDGRKGLYGISLKNIDEIDRTRKFLLRWSLRPTEPGEVRRLEPGQRFAIDQ
LNHLNALKEDRLKKMANTIIMHALGYCYDVRKKKWQAKNPACQIILFEDLSNYNPYEERS
RFENSKLMKWSRREIPRQVALQGEIYGLQVGEVGAQFSSRFHAKTGSPGIRCSVVTKEKL
QDNRFFKNLQREGRLTLDKIAVLKEGDLYPDKGGEKFISLSKDRKLVTTHADINAAQNLQ
KRFWTRTHGFYKVYCKAYQVDGQTVYIPESKDQKQKIIEEFGEGYFILKDGVYEWGNAGK
LKIKKGSSKQSSSELVDSDILKDSFDLASELKGEKLMLYRDPSGNVFPSDKWMAAGVFFG
KLERILISKLTNQYSISTIEDDSSKQSM

[0302] In some embodiments, a napDNAbp refers to Cas12c. In some embodiments, the Cas12c protein is a Cas12c1 or a variant of Cas12c1. In some embodiments, the Cas12 protein is a Cas12c2 or a variant of Cas12c2. In some embodiments, the Cas12 protein is a Cas12c protein from Oleiphilus sp. HI0009 (i.e., OspCas12c) or a variant of OspCas12c. These Cas12c molecules have been described in Yan et al., “Functionally Diverse Type V CRISPR-Cas Systems,” Science, 2019 Jan. 4; 363: 88-91; the entire contents of which is hereby incorporated by reference. In some embodiments, the napDNAbp comprises an amino acid sequence that is at least 85%, at least 90%, at least 91%, at least 92%, at least 93%, at least 94%, at least 95%, at least 96%, at least 97%, at least 98%, at least 99%, or at least 99.5% identical to a naturally-occurring Cas12c1, Cas12c2, or OspCas12c protein. In some embodiments, the napDNAbp is a naturally-occurring Cas12c1, Cas12c2, or OspCas12c protein. In some embodiments, the napDNAbp comprises an amino acid sequence that is at least 85%, at least 90%, at least 91%, at least 92%, at least 93%, at least 94%, at least 95%, at least 96%, at least 97%, at least 98%, at least 99%, or at ease 99.5% identical to any Cas12c1, Cas12c2, or OspCas12c protein described herein. It should be appreciated that Cas12c1, Cas12c2, or OspCas12c from other bacterial species may also be used in accordance with the present disclosure.

Cas12c1
MQTKKTHLHLISAKASRKYRRTIACLSDTAKKDLERRKQSGAADPAQELSCLKTIKFKLEVP
EGSKLPSFDRISQIYNALETIEKGSLSYLLFALILSGFRIFPNSSAAKTFASSSCYKNDQFA
SQIKEIFGEMVKNFIPSELESILKKGRRKNNKDWTEENIKRVLNSEFGRKNSEGSSALFDSF
LSKFSQELFRKFDSWNEVNKKYLEAAELLDSMLASYGPFDSVCKMIGDSDSRNSLPDKSTIA
FTNNAEITVDIESSVMPYMAIAALLREYRQSKSKAAPVAYVQSHLTTTNGNGLSWFFKFGLD
LIRKAPVSSKQSTSDGSKSLQELFSVPDDKLDGLKFIKEACEALPEASLLCGEKGELLGYQD
FRTSFAGHIDSWVANYVNRLFELIELVNQLPESIKLPSILTQKNHNLVASLGLQEAEVSHSL
ELFEGLVKNVRQTLKKLAGIDISSSPNEQDIKEFYAFSDVLNRLGSIRNQIENAVQTAKKDK
IDLESAIEWKEWKKLKKLPKLNGLGGGVPKQQELLDKALESVKQIRHYQRIDFERVIQWAVN
EHCLETVPKFLVDAEKKKINKESSTDFAAKENAVRFLLEGIGAAARGKTDSVSKAAYNWFVV
NNFLAKKDLNRYFINCQGCIYKPPYSKRRSLAFALRSDNKDTIEVVWEKFETFYKEISKEIE
KFNIFSQEFQTFLHLENLRMKLLLRRIQKPIPAEIAFFSLPQEYYDSLPPNVAFLALNQEIT
PSEYITQFNLYSSFLNGNLILLRRSRSYLRAKFSWVGNSKLIYAAKEARLWKIPNAYWKSDE
WKMILDSNVLVFDKAGNVLPAPTLKKVCEREGDLRLFYPLLRQLPHDWCYRNPFVKSVGREK
NVIEVNKEGEPKVASALPGSLFRLIGPAPFKSLLDDCFFNPLDKDLRECMLIVDQEISQKVE
AQKVEASLESCTYSIAVPIRYHLEEPKVSNQFENVLAIDQGEAGLAYAVFSLKSIGEAETKP
IAVGTIRIPSIRRLIHSVSTYRKKKQRLQNFKQNYDSTAFIMRENVTGDVCAKIVGLMKEFN
AFPVLEYDVKNLESGSRQLSAVYKAVNSHFLYFKEPGRDALRKQLWYGGDSWTIDGIEIVTR
ERKEDGKEGVEKIVPLKVFPGRSVSARFTSKTCSCCGRNVFDWLFTEKKAKTNKKFNVNSKG
ELTTADGVIQLFEADRSKGPKFYARRKERTPLTKPIAKGSYSLEEIERRVRTNLRRAPKSKQ
SRDTSQSQYFCVYKDCALHFSGMQADENAAINIGRRFLTALRKNRRSDFPSNVKISDRLLDN
Cas12c2
MTKHSIPLHAFRNSGADARKWKGRIALLAKRGKETMRTLQFPLEMSEPEAAAINTTPFAVAY
NAIEGTGKGTLFDYWAKLHLAGFRFFPSGGAATIFRQQAVFEDASWNAAFCQQSGKDWPWLV
PSKLYERFTKAPREVAKKDGSKKSIEFTQENVANESHVSLVGASITDKTPEDQKEFFLKMAG
ALAEKFDSWKSANEDRIVAMKVIDEFLKSEGLHLPSLENIAVKCSVETKPDNATVAWHDAPM
SGVQNLAIGVFATCASRIDNIYDLNGGKLSKLIQESATTPNVTALSWLFGKGLEYFRTTDID
TIMQDFNIPASAKESIKPLVESAQAIPTMTVLGKKNYAPFRPNFGGKIDSWIANYASRLMLL
NDILEQIEPGFELPQALLDNETLMSGIDMTGDELKELIEAVYAWVDAAKQGLATLLGRGGNV
DDAVQTFEQFSAMMDTLNGTLNTISARYVRAVEMAGKDEARLEKLIECKFDIPKWCKSVPKL
VGISGGLPKVEEEIKVMNAAFKDVRARMFVRFEEIAAYVASKGAGMDVYDALEKRELEQIKK
LKSAVPERAHIQAYRAVLHRIGRAVQNCSEKTKQLFSSKVIEMGVFKNPSHLNNFIFNQKGA
IYRSPFDRSRHAPYQLHADKLLKNDWLELLAEISATLMASESTEQMEDALRLERTRLQLQLS
GLPDWEYPASLAKPDIEVEIQTALKMQLAKDTVTSDVLQRAFNLYSSVLSGLTFKLLRRSFS
LKMRFSVADTTQLIYVPKVCDWAIPKQYLQAEGEIGIAARVVTESSPAKMVTEVEMKEPKAL
GHFMQQAPHDWYFDASLGGTQVAGRIVEKGKEVGKERKLVGYRMRGNSAYKTVLDKSLVGNT
ELSQCSMIIEIPYTQTVDADFRAQVQAGLPKVSINLPVKETITASNKDEQMLFDRFVAIDLG
ERGLGYAVFDAKTLELQESGHRPIKAITNLLNRTHHYEQRPNQRQKFQAKFNVNLSELRENT
VGDVCHQINRICAYYNAFPVLEYMVPDRLDKQLKSVYESVTNRYIWSSTDAHKSARVQFWLG
GETWEHPYLKSAKDKKPLVLSPGRGASGKGTSQTCSCCGRNPFDLIKDMKPRAKIAVVDGKA
KLENSELKLFERNLESKDDMLARRHRNERAGMEQPLTPGNYTVDEIKALLRANLRRAPKNRR
TKDTTVSEYHCVFSDCGKTMHADENAAVNIGGKFIADIEK
OspCas12c
MTKLRHRQKKLTHDWAGSKKREVLGSNGKLQNPLLMPVKKGQVTEFRKAFSAYARATKGEMT
DGRKNMFTHSFEPFKTKPSLHQCELADKAYQSLHSYLPGSLAHFLLSAHALGFRIFSKSGEA
TAFQASSKIEAYESKLASELACVDLSIQNLTISTLFNALTTSVRGKGEETSADPLIARFYTL
LTGKPLSRDTQGPERDLAEVISRKIASSFGTWKEMTANPLQSLQFFEEELHALDANVSLSPA
FDVLIKMNDLQGDLKNRTIVFDPDAPVFEYNAEDPADIIIKLTARYAKEAVIKNQNVGNYVK
NAITTTNANGLGWLLNKGLSLLPVSTDDELLEFIGVERSHPSCHALIELIAQLEAPELFEKN
VFSDTRSEVQGMIDSAVSNHIARLSSSRNSLSMDSEELERLIKSFQIHTPHCSLFIGAQSLS
QQLESLPEALQSGVNSADILLGSTQYMLTNSLVEESIATYQRTLNRINYLSGVAGQINGAIK
RKAIDGEKIHLPAAWSELISLPFIGQPVIDVESDLAHLKNQYQTLSNEFDTLISALQKNFDL
NFNKALLNRTQHFEAMCRSTKKNALSKPEIVSYRDLLARLTSCLYRGSLVLRRAGIEVLKKH
KIFESNSELREHVHERKHFVFVSPLDRKAKKLLRLTDSRPDLLHVIDEILQHDNLENKDRES
LWLVRSGYLLAGLPDQLSSSFINLPIITQKGDRRLIDLIQYDQINRDAFVMLVTSAFKSNLS
GLQYRANKQSFVVTRTLSPYLGSKLVYVPKDKDWLVPSQMFEGRFADILQSDYMVWKDAGRL
CVIDTAKHLSNIKKSVFSSEEVLAFLRELPHRTFIQTEVRGLGVNVDGIAFNNGDIPSLKTF
SNCVQVKVSRTNTSLVQTLNRWFEGGKVSPPSIQFERAYYKKDDQIHEDAAKRKIRFQMPAT
ELVHASDDAGWTPSYLLGIDPGEYGMGLSLVSINNGEVLDSGFIHINSLINFASKKSNHQTK
VVPRQQYKSPYANYLEQSKDSAAGDIAHILDRLIYKLNALPVFEALSGNSQSAADQVWTKVL
SFYTWGDNDAQNSIRKQHWFGASHWDIKGMLRQPPTEKKPKPYIAFPGSQVSSYGNSQRCSC
CGRNPIEQLREMAKDTSIKELKIRNSEIQLFDGTIKLFNPDPSTVIERRRHNLGPSRIPVAD
RTFKNISPSSLEFKELITIVSRSIRHSPEFIAKKRGIGSEYFCAYSDCNSSLNSEANAAANV
AQKFQKQLFFEL

[0303] In some embodiments, a napDNAbp refers to Cas12g, Cas12h, or Cas12i, which have been described in, for example, Yan et al., “Functionally Diverse Type V CRISPR-Cas Systems,” Science, 2019 Jan. 4; 363: 88-91; the entire contents of each is hereby incorporated by reference. By aggregating more than 10 terabytes of sequence data, new classifications of Type V Cas proteins were identified that showed weak similarity to previously characterized Class V protein, including Cas12g, Cas12h, and Cas12i. In some embodiments, the Cas12 protein is a Cas12g or a variant of Cas12g. In some embodiments, the Cas12 protein is a Cas12h or a variant of Cas12h. In some embodiments, the Cas12 protein is a Cas12i or a variant of Cas12i. It should be appreciated that other RNA-guided DNA binding proteins may be used as a napDNAbp, and are within the scope of this disclosure. In some embodiments, the napDNAbp comprises an amino acid sequence that is at least 85%, at least 90%, at least 91%, at least 92%, at least 93%, at least 94%, at least 95%, at least 96%, at least 97%, at least 98%, at least 99%, or at least 99.5% identical to a naturally-occurring Cas12g, Cas12h, or Cas12i protein. In some embodiments, the napDNAbp is a naturally-occurring Cas12g, Cas12h, or Cas12i protein. In some embodiments, the napDNAbp comprises an amino acid sequence that is at least 85%, at least 90%, at least 91%, at least 92%, at least 93%, at least 94%, at least 95%, at least 96%, at least 97%, at least 98%, at least 99%, or at ease 99.5% identical to any Cas12g, Cas12h, or Cas12i protein described herein. It should be appreciated that Cas12g, Cas12h, or Cas12i from other bacterial species may also be used in accordance with the present disclosure. In some embodiments, the Cas12i is a Cas12i1 or a Cas12i2.

Cas12g1
MAQASSTPAVSPRPRPRYREERTLVRKLLPRPGQSKQEFRENVKKLRKAFLQFNADVSGVCQ
WAIQFRPRYGKPAEPTETFWKFFLEPETSLPPNDSRSPEFRRLQAFEAAAGINGAAALDDPA
FTNELRDSILAVASRPKTKEAQRLFSRLKDYQPAHRMILAKVAAEWIESRYRRAHQNWERNY
EEWKKEKQEWEQNHPELTPEIREAFNQIFQQLEVKEKRVRICPAARLLQNKDNCQYAGKNKH
SVLCNQFNEFKKNHLQGKAIKFFYKDAEKYLRCGLQSLKPNVQGPFREDWNKYLRYMNLKEE
TLRGKNGGRLPHCKNLGQECEFNPHTALCKQYQQQLSSRPDLVQHDELYRKWRREYWREPRK
PVFRYPSVKRHSIAKIFGENYFQADFKNSVVGLRLDSMPAGQYLEFAFAPWPRNYRPQPGET
ElSSVHLHFVGTRPRIGFRFRVPHKRSRFDCTQEELDELRSRTFPRKAQDQKFLEAARKRLL
ETFPGNAEQELRLLAVDLGTDSARAAFFIGKTFQQAFPLKIVKIEKLYEQWPNQKQAGDRRD
ASSKQPRPGLSRDHVGRHLQKMRAQASEIAQKRQELTGTPAPETTTDQAAKKATLQPFDLRG
LTVHTARMIRDWARLNARQIIQLAEENQVDLIVLESLRGFRPPGYENLDQEKKRRVAFFAHG
RIRRKVTEKAVERGMRVVTVPYLASSKVCAECRKKQKDNKQWEKNKKRGLFKCEGCGSQAQV
DENAARVLGRVFWGEIELPTAIP
Cas12h1
MKVHEIPRSQLLKIKQYEGSFVEWYRDLQEDRKKFASLLFRWAAFGYAAREDDGATYISPSQ
ALLERRLLLGDAEDVAIKFLDVLFKGGAPSSSCYSLFYEDFALRDKAKYSGAKREFIEGLAT
MPLDKIIERIRQDEQLSKIPAEEWLILGAEYSPEEIWEQVAPRIVNVDRSLGKQLRERLGIK
CRRPHDAGYCKILMEVVARQLRSHNETYHEYLNQTHEMKTKVANNLTNEFDLVCEFAEVLEE
KNYGLGWYVLWQGVKQALKEQKKPTKIQIAVDQLRQPKFAGLLTAKWRALKGAYDTWKLKKR
LEKRKAFPYMPNWDNDYQIPVGLTGLGVFTLEVKRTEVVVDLKEHGKLFCSHSHYFGDLTAE
KHPSRYHLKFRHKLKLRKRDSRVEPTIGPWIEAALREITIQKKPNGVFYLGLPYALSHGIDN
FQIAKRFFSAAKPDKEVINGLPSEMVVGAADLNLSNIVAPVKARIGKGLEGPLHALDYGYGE
LIDGPKILTPDGPRCGELISLKRDIVEIKSAIKEFKACQREGLTMSEETTTWLSEVESPSDS
PRCMIQSRIADTSRRLNSFKYQMNKEGYQDLAEALRLLDAMDSYNSLLESYQRMHLSPGEQS
PKEAKFDTKRASFRDLLRRRVAHTIVEYFDDCDIVFFEDLDGPSDSDSRNNALVKLLSPRTL
LLYIRQALEKRGIGMVEVAKDGTSQNNPISGHVGWRNKQNKSEIYFYEDKELLVMDADEVGA
MNILCRGLNHSVCPYSFVTKAPEKKNDEKKEGDYGKRVKRFLKDRYGSSNVRFLVASMGFVT
VTTKRPKDALVGKRLYYHGGELVTHDLHNRMKDEIKYLVEKEVLARRVSLSDSTIKSYKSFA
HV
Cas12i1
MSNKEKNASETRKAYTTKMIPRSHDRMKLLGNFMDYLMDGTPIFFELWNQFGGGIDRDIISG
TANKDKISDDLLLAVNWFKVMPINSKPQGVSPSNLANLFQQYSGSEPDIQAQEYFASNFDTE
KHQWKDMRVEYERLLAELQLSRSDMHHDLKLMYKEKCIGLSLSTAHYITSVMFGTGAKNNRQ
TKHQFYSKVIQLLEESTQINSVEQLASIILKAGDCDSYRKLRIRCSRKGATPSILKIVQDYE
LGTNHDDEVNVPSLIANLKEKLGRFEYECEWKCMEKIKAFLASKVGPYYLGSYSAMLENALS
PIKGMTTKNCKFVLKQIDAKNDIKYENEPFGKIVEGFFDSPYFESDTNVKWVLHPHHIGESN
IKTLWEDLNAIHSKYEEDIASLSEDKKEKRIKVYQGDVCQTINTYCEEVGKEAKTPLVQLLR
YLYSRKDDIAVDKIIDGITFLSKKHKVEKQKINPVIQKYPSFNFGNNSKLLGKIISPKDKLK
HNLKCNRNQVDNYIWIEIKVLNTKTMRWEKHHYALSSTRFLEEVYYPATSENPPDALAARFR
TKTNGYEGKPALSAEQIEQIRSAPVGLRKVKKRQMRLEAARQQNLLPRYTWGKDFNINICKR
GNNFEVTLATKVKKKKEKNYKVVLGYDANIVRKNTYAAIEAHANGDGVIDYNDLPVKPIESG
FVTVESQVRDKSYDQLSYNGVKLLYCKPHVESRRSFLEKYRNGTMKDNRGNNIQIDFMKDFE
AIADDETSLYYFNMKYCKLLQSSIRNHSSQAKEYREEIFELLRDGKLSVLKLSSLSNLSFVM
FKVAKSLIGTYFGHLLKKPKNSKSDVKAPPITDEDKQKADPEMFALRLALEEKRLNKVKSKK
EVIANKIVAKALELRDKYGPVLIKGENISDTTKKGKKSSTNSFLMDWLARGVANKVKEMVMM
HQGLEFVEVNPNFTSHQDPFVHKNPENTFRARYSRCTPSELTEKNRKEILSFLSDKPSKRPT
NAYYNEGAMAFLATYGLKKNDVLGVSLEKFKQIMANILHQRSEDQLLFPSRGGMFYLATYKL
DADATSVNWNGKQFWVCNADLVAAYNVGLVDIQKDFKKK
Cas12i2
MSSAIKSYKSVLRPNERKNQLLKSTIQCLEDGSAFFFKMLQGLFGGITPEIVRFSTEQEKQQ
QDIALWCAVNWFRPVSQDSLTHTIASDNLVEKFEEYYGGTASDAIKQYFSASIGESYYWNDC
RQQYYDLCRELGVEVSDLTHDLEILCREKCLAVATESNQNNSIISVLFGTGEKEDRSVKLRI
TKKILEAISNLKEIPKNVAPIQEIILNVAKATKETFRQVYAGNLGAPSTLEKFIAKDGQKEF
DLKKLQTDLKKVIRGKSKERDWCCQEELRSYVEQNTIQYDLWAWGEMFNKAHTALKIKSTRN
YNFAKQRLEQFKEIQSLNNLLVVKKLNDFFDSEFFSGEETYTICVHHLGGKDLSKLYKAWED
DPADPENAIVVLCDDLKNNFKKEPIRNILRYIFTIRQECSAQDILAAAKYNQQLDRYKSQKA
NPSVLGNQGFTWTNAVILPEKAQRNDRPNSLDLRIWLYLKLRHPDGRWKKHHIPFYDTRFFQ
EIYAAGNSPVDTCQFRTPRFGYHLPKLTDQTAIRVNKKHVKAAKTEARIRLAIQQGTLPVSN
LKITEISATINSKGQVRIPVKFDVGRQKGTLQIGDRFCGYDQNQTASHAYSLWEVVKEGQYH
KELGCFVRFISSGDIVSITENRGNQFDQLSYEGLAYPQYADWRKKASKFVSLWQITKKNKKK
EIVTVEAKEKFDAICKYQPRLYKFNKEYAYLLRDIVRGKSLVELQQIRQEIFRFIEQDCGVT
RLGSLSLSTLETVKAVKGIIYSYFSTALNASKNNPISDEQRKEFDPELFALLEKLELIRTRK
KKQKVERIANSLIQTCLENNIKFIRGEGDLSTTNNATKKKANSRSMDWLARGVFNKIRQLAP
MHNITLFGCGSLYTSHQDPLVHRNPDKAMKCRWAAIPVKDIGDWVLRKLSQNLRAKNIGTGE
YYHQGVKEFLSHYELQDLEEELLKWRSDRKSNIPCWVLQNRLAEKLGNKEAVVYIPVRGGRI
YFATHKVATGAVSIVFDQKQVWVCNADHVAAANIALTVKGIGEQSSDEENPDGSRIKLQLTS

[0304] Representative nucleic acid and protein sequences of the base editors follow:

BhCas12b GGSGGS-ABE8-Xten20 at P153

[chemical structure]

CAGATCCTTCATCCTGAAGATCGAGCCCAACGAGGAAGTGAAGAAAGGCCTCTGGAAAACCC
ACGAGGTGCTGAACCACGGAATCGCCTACTACATGAATATCCTGAAGCTGATCCGGCAAGAG
GCCATCTACGAGCACCACGAGCAGGACCCCAAGAATCCCAAGAAGGTGTCCAAGGCCGAGAT
CCAGGCCGAGCTGTGGGATTTCGTGCTGAAGATGCAGAAGTGCAACAGCTTCACACACGAGG
TGGACAAGGACGAGGTGTTCAACATCCTGAGAGAGCTGTACGAGGAACTGGTGCCCAGCAGC
GTGGAAAAGAAGGGCGAAGCCAACCAGCTGAGCAACAAGTTTCTGTACCCTCTGGTGGACCC
CAACAGCCAGTCTGGAAAGGGAACAGCCAGCAGCGGCAGAAAGCCCAGATGGTACAACCTGA

[chemical structure]

[chemical structure]

[chemical structure]

[chemical structure]

[chemical structure]

[chemical structure]

[chemical structure]

[chemical structure]

[chemical structure]

GCACAAGCGAGAGCGCCACCCCTGAGAGCTCTGGCTCCTGGGAAGAAGAGAAGAAGAAGTGG
GAAGAAGATAAGAAAAAGGACCCGCTGGCCAAGATCCTGGGCAAGCTGGCTGAGTACGGACT
GATCCCTCTGTTCATCCCCTACACCGACAGCAACGAGCCCATCGTGAAAGAAATCAAGTGGA
TGGAAAAGTCCCGGAACCAGAGCGTGCGGCGGCTGGATAAGGACATGTTCATTCAGGCCCTG
GAACGGTTCCTGAGCTGGGAGAGCTGGAACCTGAAAGTGAAAGAGGAATACGAGAAGGTCGA
GAAAGAGTACAAGACCCTGGAAGAGAGGATCAAAGAGGACATCCAGGCTCTGAAGGCTCTGG
AACAGTATGAGAAAGAGCGGCAAGAACAGCTGCTGCGGGACACCCTGAACACCAACGAGTAC
CGGCTGAGCAAGAGAGGCCTTAGAGGCTGGCGGGAAATCATCCAGAAATGGCTGAAAATGGA
CGAGAACGAGCCCTCCGAGAAGTACCTGGAAGTGTTCAAGGACTACCAGCGGAAGCACCCTA
GAGAGGCCGGCGATTACAGCGTGTACGAGTTCCTGTCCAAGAAAGAGAACCACTTCATCTGG
CGGAATCACCCTGAGTACCCCTACCTGTACGCCACCTTCTGCGAGATCGACAAGAAAAAGAA
GGACGCCAAGCAGCAGGCCACCTTCACACTGGCCGATCCTATCAATCACCCTCTGTGGGTCC
GATTCGAGGAAAGAAGCGGCAGCAACCTGAACAAGTACAGAATCCTGACCGAGCAGCTGCAC
ACCGAGAAGCTGAAGAAAAAGCTGACAGTGCAGCTGGACCGGCTGATCTACCCTACAGAATC
TGGCGGCTGGGAAGAGAAGGGCAAAGTGGACATTGTGCTGCTGCCCAGCCGGCAGTTCTACA
ACCAGATCTTCCTGGACATCGAGGAAAAGGGCAAGCACGCCTTCACCTACAAGGATGAGAGC
ATCAAGTTCCCTCTGAAGGGCACACTCGGCGGAGCCAGAGTGCAGTTCGACAGAGATCACCT
GAGAAGATACCCTCACAAGGTGGAAAGCGGCAACGTGGGCAGAATCTACTTCAACATGACCG
TGAACATCGAGCCTACAGAGTCCCCAGTGTCCAAGTCTCTGAAGATCCACCGGGACGACTTC
CCCAAGGTGGTCAACTTCAAGCCCAAAGAACTGACCGAGTGGATCAAGGACAGCAAGGGCAA
GAAACTGAAGTCCGGCATCGAGTCCCTGGAAATCGGCCTGAGAGTGATGAGCATCGACCTGG
GACAGAGACAGGCCGCTGCCGCCTCTATTTTCGAGGTGGTGGATCAGAAGCCCGACATCGAA
GGCAAGCTGTTTTTCCCAATCAAGGGCACCGAGCTGTATGCCGTGCACAGAGCCAGCTTCAA
CATCAAGCTGCCCGGCGAGACACTGGTCAAGAGCAGAGAAGTGCTGCGGAAGGCCAGAGAGG
ACAATCTGAAACTGATGAACCAGAAGCTCAACTTCCTGCGGAACGTGCTGCACTTCCAGCAG
TTCGAGGACATCACCGAGAGAGAGAAGCGGGTCACCAAGTGGATCAGCAGACAAGAGAACAG
CGACGTGCCCCTGGTGTACCAGGATGAGCTGATCCAGATCCGCGAGCTGATGTACAAGCCTT
ACAAGGACTGGGTCGCCTTCCTGAAGCAGCTCCACAAGAGACTGGAAGTCGAGATCGGCAAA
GAAGTGAAGCACTGGCGGAAGTCCCTGAGCGACGGAAGAAAGGGCCTGTACGGCATCTCCCT
GAAGAACATCGACGAGATCGATCGGACCCGGAAGTTCCTGCTGAGATGGTCCCTGAGGCCTA
CCGAACCTGGCGAAGTGCGTAGACTGGAACCCGGCCAGAGATTCGCCATCGACCAGCTGAAT
CACCTGAACGCCCTGAAAGAAGATCGGCTGAAGAAGATGGCCAACACCATCATCATGCACGC
CCTGGGCTACTGCTACGACGTGCGGAAGAAGAAATGGCAGGCTAAGAACCCCGCCTGCCAGA
TCATCCTGTTCGAGGATCTGAGCAACTACAACCCCTACGAGGAAAGGTCCCGCTTCGAGAAC
AGCAAGCTCATGAAGTGGTCCAGACGCGAGATCCCCAGACAGGTTGCACTGCAGGGCGAGAT
CTATGGCCTGCAAGTGGGAGAAGTGGGCGCTCAGTTCAGCAGCAGATTCCACGCCAAGACAG
GCAGCCCTGGCATCAGATGTAGCGTCGTGACCAAAGAGAAGCTGCAGGACAATCGGTTCTTC
AAGAATCTGCAGAGAGAGGGCAGACTGACCCTGGACAAAATCGCCGTGCTGAAAGAGGGCGA
TCTGTACCCAGACAAAGGCGGCGAGAAGTTCATCAGCCTGAGCAAGGATCGGAAGTGCGTGA
CCACACACGCCGACATCAACGCCGCTCAGAACCTGCAGAAGCGGTTCTGGACAAGAACCCAC
GGCTTCTACAAGGTGTACTGCAAGGCCTACCAGGTGGACGGCCAGACCGTGTACATCCCT
GAGAGCAAGGACCAGAAGCAGAAGATCATCGAAGAGTTCGGCGAGGGCTACTTCATTCTGAA
GGACGGGGTGTACGAATGGGTCAACGCCGGCAAGCTGAAAATCAAGAAGGGCAGCTCCAAGC
AGAGCAGCAGCGAGCTGGTGGATAGCGACATCCTGAAAGACAGCTTCGACCTGGCCTCCGAG
CTGAAAGGCGAAAAGCTGATGCTGTACAGGGACCCCAGCGGCAATGTGTTCCCCAGCGACAA
ATGGATGGCCGCTGGCGTGTTCTTCGGAAAGCTGGAACGCATCCTGATCAGCAAGCTGACCA
ACCAGTACTCCATCAGCACCATCGAGGACGACAGCAGCAAGCAGTCTATGAAAAGGCCGGCG

[chemical structure]

TTACGCTTATCCCTACGACGTGCCTGATTATGCATACCCATATGATGTCCCCGACTATGCCT
AA
MAPKKKRKVGIHGVPAAATRSFILKIEPNEEVKKGLWKTHEVLNHGIAYYMNILKLIRQEAI
YEHHEQDPKNPKKVSKAEIQAELWDFVLKMQKCNSFTHEVDKDEVFNILRELYEELVPSSVE
KKGEANQLSNKFLYPLVDPNSQSGKGTASSGRKPRWYNLKIAGDPGGSGGSSEVEFSHEYWM
RHALTLAKRARDEREVPVGAVLVLNNRVIGEGWNRAIGLHDPTAHAEIMALRQGGLVMQNYR
LYDATLYVTFEPCVMCAGAMIHSRIGRVVFGVRNAKTGAAGSLMDVLHHPGMNHRVEITEGI
LADECAALLCRFFRMPRRVFNAQKKAQSSTDGSSGSETPGTSESATPESSGSWEEEKKKWEE
DKKKDPLAKILGKLAEYGLIPLFIPYTDSNEPIVKEIKWMEKSRNQSVRRLDKDMFIQALER
FLSWESWNLKVKEEYEKVEKEYKTLEERIKEDIQALKALEQYEKERQEQLLRDTLNTNEYRL
SKRGLRGWREIIQKWLKMDENEPSEKYLEVFKDYQRKHPREAGDYSVYEFLSKKENHFIWRN
HPEYPYLYATFCEIDKKKKDAKQQATFTLADPINHPLWVRFEERSGSNLNKYRILTEQLHTE
KLKKKLTVQLDRLIYPTESGGWEEKGKVDIVLLPSRQFYNQIFLDIEEKGKHAFTYKDESIK
FPLKGTLGGARVQFDRDHLRRYPHKVESGNVGRIYFNMTVNIEPTESPVSKSLKIHRDDFPK
VVNFKPKELTEWIKDSKGKKLKSGIESLEIGLRVMSIDLGQRQAAAASIFEVVDQKPDIEGK
LFFPIKGTELYAVHRASFNIKLPGETLVKSREVLRKAREDNLKLMNQKLNFLRNVLHFQQFE
DITEREKRVTKWISRQENSDVPLVYQDELIQIRELMYKPYKDWVAFLKQLHKRLEVEIGKEV
KHWRKSLSDGRKGLYGISLKNIDEIDRTRKFLLRWSLRPTEPGEVRRLEPGQRFAIDQLNHL
NALKEDRLKKMANTIIMHALGYCYDVRKKKWQAKNPACQIILFEDLSNYNPYEERSRFENSK
LMKWSRREIPRQVALQGEIYGLQVGEVGAQFSSRFHAKTGSPGIRCSVVTKEKLQDNRFFKN
LQREGRLTLDKIAVLKEGDLYPDKGGEKFISLSKDRKCVTTHADINAAQNLQKRFWTRTHGF
YKVYCKAYQVDGQTVYIPESKDQKQKIIEEFGEGYFILKDGVYEWVNAGKLKIKKGSSKQSS
SELVDSDILKDSFDLASELKGEKLMLYRDPSGNVFPSDKWMAAGVFFGKLERILISKLTNQY
SISTIEDDSSKQSMKRPAATKKAGQAKKKKGSYPYDVPDYAYPYDVPDYAYPYDVPDYA
BhCas12b GGSGGS-ABE8-Xten20 at K255

[chemical structure]

CAGATCCTTCATCCTGAAGATCGAGCCCAACGAGGAAGTGAAGAAAGGCCTCTGGAAAACCC
ACGAGGTGCTGAACCACGGAATCGCCTACTACATGAATATCCTGAAGCTGATCCGGCAAGAG
GCCATCTACGAGCACCACGAGCAGGACCCCAAGAATCCCAAGAAGGTGTCCAAGGCCGAGAT
CCAGGCCGAGCTGTGGGATTTCGTGCTGAAGATGCAGAAGTGCAACAGCTTCACACACGAGG
TGGACAAGGACGAGGTGTTCAACATCCTGAGAGAGCTGTACGAGGAACTGGTGCCCAGCAGC
GTGGAAAAGAAGGGCGAAGCCAACCAGCTGAGCAACAAGTTTCTGTACCCTCTGGTGGACCC
CAACAGCCAGTCTGGAAAGGGAACAGCCAGCAGCGGCAGAAAGCCCAGATGGTACAACCTGA
AGATTGCCGGCGATCCCTCCTGGGAAGAAGAGAAGAAGAAGTGGGAAGAAGATAAGAAAAAG
GACCCGCTGGCCAAGATCCTGGGCAAGCTGGCTGAGTACGGACTGATCCCTCTGTTCATCCC
CTACACCGACAGCAACGAGCCCATCGTGAAAGAAATCAAGTGGATGGAAAAGTCCCGGAACC
AGAGCGTGCGGCGGCTGGATAAGGACATGTTCATTCAGGCCCTGGAACGGTTCCTGAGCTGG
GAGAGCTGGAACCTGAAAGTGAAAGAGGAATACGAGAAGGTCGAGAAAGAGTACAAGACCCT

[chemical structure]

[chemical structure]

[chemical structure]

[chemical structure]

[chemical structure]

[chemical structure]

[chemical structure]

[chemical structure]

[chemical structure]

CACAAGCGAGAGCGCCACCCCTGAGAGCTCTGGCGAGGACATCCAGGCTCTGAAGGCTCTGG
AACAGTATGAGAAAGAGCGGCAAGAACAGCTGCTGCGGGACACCCTGAACACCAACGAGTAC
CGGCTGAGCAAGAGAGGCCTTAGAGGCTGGCGGGAAATCATCCAGAAATGGCTGAAAATGGA
CGAGAACGAGCCCTCCGAGAAGTACCTGGAAGTGTTCAAGGACTACCAGCGGAAGCACCCTA
GAGAGGCCGGCGATTACAGCGTGTACGAGTTCCTGTCCAAGAAAGAGAACCACTTCATCTGG
CGGAATCACCCTGAGTACCCCTACCTGTACGCCACCTTCTGCGAGATCGACAAGAAAAAGAA
GGACGCCAAGCAGCAGGCCACCTTCACACTGGCCGATCCTATCAATCACCCTCTGTGGGTCC
GATTCGAGGAAAGAAGCGGCAGCAACCTGAACAAGTACAGAATCCTGACCGAGCAGCTGCAC
ACCGAGAAGCTGAAGAAAAAGCTGACAGTGCAGCTGGACCGGCTGATCTACCCTACAGAATC
TGGCGGCTGGGAAGAGAAGGGCAAAGTGGACATTGTGCTGCTGCCCAGCCGGCAGTTCTACA
ACCAGATCTTCCTGGACATCGAGGAAAAGGGCAAGCACGCCTTCACCTACAAGGATGAGAGC
ATCAAGTTCCCTCTGAAGGGCACACTCGGCGGAGCCAGAGTGCAGTTCGACAGAGATCACCT
GAGAAGATACCCTCACAAGGTGGAAAGCGGCAACGTGGGCAGAATCTACTTCAACATGACCG
TGAACATCGAGCCTACAGAGTCCCCAGTGTCCAAGTCTCTGAAGATCCACCGGGACGACTTC
CCCAAGGTGGTCAACTTCAAGCCCAAAGAACTGACCGAGTGGATCAAGGACAGCAAGGGCAA
GAAACTGAAGTCCGGCATCGAGTCCCTGGAAATCGGCCTGAGAGTGATGAGCATCGACCTGG
GACAGAGACAGGCCGCTGCCGCCTCTATTTTCGAGGTGGTGGATCAGAAGCCCGACATCGAA
GGCAAGCTGTTTTTCCCAATCAAGGGCACCGAGCTGTATGCCGTGCACAGAGCCAGCTTCAA
CATCAAGCTGCCCGGCGAGACACTGGTCAAGAGCAGAGAAGTGCTGCGGAAGGCCAGAGAGG
ACAATCTGAAACTGATGAACCAGAAGCTCAACTTCCTGCGGAACGTGCTGCACTTCCAGCAG
TTCGAGGACATCACCGAGAGAGAGAAGCGGGTCACCAAGTGGATCAGCAGACAAGAGAACAG
CGACGTGCCCCTGGTGTACCAGGATGAGCTGATCCAGATCCGCGAGCTGATGTACAAGCCTT
ACAAGGACTGGGTCGCCTTCCTGAAGCAGCTCCACAAGAGACTGGAAGTCGAGATCGGCAAA
GAAGTGAAGCACTGGCGGAAGTCCCTGAGCGACGGAAGAAAGGGCCTGTACGGCATCTCCCT
GAAGAACATCGACGAGATCGATCGGACCCGGAAGTTCCTGCTGAGATGGTCCCTGAGGCCTA
CCGAACCTGGCGAAGTGCGTAGACTGGAACCCGGCCAGAGATTCGCCATCGACCAGCTGAAT
CACCTGAACGCCCTGAAAGAAGATCGGCTGAAGAAGATGGCCAACACCATCATCATGCACGC
CCTGGGCTACTGCTACGACGTGCGGAAGAAGAAATGGCAGGCTAAGAACCCCGCCTGCCAGA
TCATCCTGTTCGAGGATCTGAGCAACTACAACCCCTACGAGGAAAGGTCCCGCTTCGAGAAC
AGCAAGCTCATGAAGTGGTCCAGACGCGAGATCCCCAGACAGGTTGCACTGCAGGGCGAGAT
CTATGGCCTGCAAGTGGGAGAAGTGGGCGCTCAGTTCAGCAGCAGATTCCACGCCAAGACAG
GCAGCCCTGGCATCAGATGTAGCGTCGTGACCAAAGAGAAGCTGCAGGACAATCGGTTCTTC
AAGAATCTGCAGAGAGAGGGCAGACTGACCCTGGACAAAATCGCCGTGCTGAAAGAGGGCGA
TCTGTACCCAGACAAAGGCGGCGAGAAGTTCATCAGCCTGAGCAAGGATCGGAAGTGCGTGA
CCACACACGCCGACATCAACGCCGCTCAGAACCTGCAGAAGCGGTTCTGGACAAGAACCCAC
GGCTTCTACAAGGTGTACTGCAAGGCCTACCAGGTGGACGGCCAGACCGTGTACATCCCTGA
GAGCAAGGACCAGAAGCAGAAGATCATCGAAGAGTTCGGCGAGGGCTACTTCATTCTGAAGG
ACGGGGTGTACGAATGGGTCAACGCCGGCAAGCTGAAAATCAAGAAGGGCAGCTCCAAGCAG
AGCAGCAGCGAGCTGGTGGATAGCGACATCCTGAAAGACAGCTTCGACCTGGCCTCCGAGCT
GAAAGGCGAAAAGCTGATGCTGTACAGGGACCCCAGCGGCAATGTGTTCCCCAGCGACAAAT
GGATGGCCGCTGGCGTGTTCTTCGGAAAGCTGGAACGCATCCTGATCAGCAAGCTGACCAAC
CAGTACTCCATCAGCACCATCGAGGACGACAGCAGCAAGCAGTCTATGAAAAGGCCGGCGGC

[chemical structure]

ACGCTTATCCCTACGACGTGCCTGATTATGCATACCCATATGATGTCCCCGACTATGCCTAA
MAPKKKRKVGIHGVPAAATRSFILKIEPNEEVKKGLWKTHEVLNHGIAYYMNILKLIRQEAI
YEHHEQDPKNPKKVSKAEIQAELWDFVLKMQKCNSFTHEVDKDEVFNILRELYEELVPSSVE
KKGEANQLSNKFLYPLVDPNSQSGKGTASSGRKPRWYNLKIAGDPSWEEEKKKWEEDKKKDP
LAKILGKLAEYGLIPLFIPYTDSNEPIVKEIKWMEKSRNQSVRRLDKDMFIQALERFLSWES
WNLKVKEEYEKVEKEYKTLEERIKGGSGGSSEVEFSHEYWMRHALTLAKRARDEREVPVGAV
LVLNNRVIGEGWNRAIGLHDPTAHAEIMALRQGGLVMQNYRLYDATLYVTFEPCVMCAGAMI
HSRIGRVVFGVRNAKTGAAGSLMDVLHHPGMNHRVEITEGILADECAALLCRFFRMPRRVFN
AQKKAQSSTDGSSGSETPGTSESATPESSGEDIQALKALEQYEKERQEQLLRDTLNTNEYRL
SKRGLRGWREIIQKWLKMDENEPSEKYLEVFKDYQRKHPREAGDYSVYEFLSKKENHFIWRN
HPEYPYLYATFCEIDKKKKDAKQQATFTLADPINHPLWVRFEERSGSNLNKYRILTEQLHTE
KLKKKLTVQLDRLIYPTESGGWEEKGKVDIVLLPSRQFYNQIFLDIEEKGKHAFTYKDESIK
FPLKGTLGGARVQFDRDHLRRYPHKVESGNVGRIYFNMTVNIEPTESPVSKSLKIHRDDFPK
VVNFKPKELTEWIKDSKGKKLKSGIESLEIGLRVMSIDLGQRQAAAASIFEVVDQKPDIEGK
LFFPIKGTELYAVHRASFNIKLPGETLVKSREVLRKAREDNLKLMNQKLNFLRNVLHFQQFE
DITEREKRVTKWISRQENSDVPLVYQDELIQIRELMYKPYKDWVAFLKQLHKRLEVEIGKEV
KHWRKSLSDGRKGLYGISLKNIDEIDRTRKFLLRWSLRPTEPGEVRRLEPGQRFAIDQLNHL
NALKEDRLKKMANTIIMHALGYCYDVRKKKWQAKNPACQIILFEDLSNYNPYEERSRFENSK
LMKWSRREIPRQVALQGEIYGLQVGEVGAQFSSRFHAKTGSPGIRCSVVTKEKLQDNRFFKN
LQREGRLTLDKIAVLKEGDLYPDKGGEKFISLSKDRKCVTTHADINAAQNLQKRFWTRTHGF
YKVYCKAYQVDGQTVYIPESKDQKQKIIEEFGEGYFILKDGVYEWVNAGKLKIKKGSSKQSS
SELVDSDILKDSFDLASELKGEKLMLYRDPSGNVFPSDKWMAAGVFFGKLERILISKLTNQY
SISTIEDDSSKQSMKRPAATKKAGQAKKKKGSYPYDVPDYAYPYDVPDYAYPYDVPDYA
BhCas12b GGSGGS-ABE8-Xten20 at D306

[chemical structure]

CAGATCCTTCATCCTGAAGATCGAGCCCAACGAGGAAGTGAAGAAAGGCCTCTGGAAAACCC
ACGAGGTGCTGAACCACGGAATCGCCTACTACATGAATATCCTGAAGCTGATCCGGCAAGAG
GCCATCTACGAGCACCACGAGCAGGACCCCAAGAATCCCAAGAAGGTGTCCAAGGCCGAGAT
CCAGGCCGAGCTGTGGGATTTCGTGCTGAAGATGCAGAAGTGCAACAGCTTCACACACGAGG
TGGACAAGGACGAGGTGTTCAACATCCTGAGAGAGCTGTACGAGGAACTGGTGCCCAGCAGC
GTGGAAAAGAAGGGCGAAGCCAACCAGCTGAGCAACAAGTTTCTGTACCCTCTGGTGGACCC
CAACAGCCAGTCTGGAAAGGGAACAGCCAGCAGCGGCAGAAAGCCCAGATGGTACAACCTGA
AGATTGCCGGCGATCCCTCCTGGGAAGAAGAGAAGAAGAAGTGGGAAGAAGATAAGAAAAAG
GACCCGCTGGCCAAGATCCTGGGCAAGCTGGCTGAGTACGGACTGATCCCTCTGTTCATCCC
CTACACCGACAGCAACGAGCCCATCGTGAAAGAAATCAAGTGGATGGAAAAGTCCCGGAACC
AGAGCGTGCGGCGGCTGGATAAGGACATGTTCATTCAGGCCCTGGAACGGTTCCTGAGCTGG
GAGAGCTGGAACCTGAAAGTGAAAGAGGAATACGAGAAGGTCGAGAAAGAGTACAAGACCCT
GGAAGAGAGGATCAAAGAGGACATCCAGGCTCTGAAGGCTCTGGAACAGTATGAGAAAGAGC
GGCAAGAACAGCTGCTGCGGGACACCCTGAACACCAACGAGTACCGGCTGAGCAAGAGAGGC
CTTAGAGGCTGGCGGGAAATCATCCAGAAATGGCTGAAAATGGACggaggctctggaggaag

[chemical structure]

[chemical structure]

[chemical structure]

[chemical structure]

[chemical structure]

[chemical structure]

[chemical structure]

[chemical structure]

[chemical structure]

CGAGAACGAGCCCTCCGAGAAGTACCTGGAAGTGTTCAAGGACTACCAGCGGAAGCACCCTA
GAGAGGCCGGCGATTACAGCGTGTACGAGTTCCTGTCCAAGAAAGAGAACCACTTCATCTGG
CGGAATCACCCTGAGTACCCCTACCTGTACGCCACCTTCTGCGAGATCGACAAGAAAAAGAA
GGACGCCAAGCAGCAGGCCACCTTCACACTGGCCGATCCTATCAATCACCCTCTGTGGGTCC
GATTCGAGGAAAGAAGCGGCAGCAACCTGAACAAGTACAGAATCCTGACCGAGCAGCTGCAC
ACCGAGAAGCTGAAGAAAAAGCTGACAGTGCAGCTGGACCGGCTGATCTACCCTACAGAATC
TGGCGGCTGGGAAGAGAAGGGCAAAGTGGACATTGTGCTGCTGCCCAGCCGGCAGTTCTACA
ACCAGATCTTCCTGGACATCGAGGAAAAGGGCAAGCACGCCTTCACCTACAAGGATGAGAGC
ATCAAGTTCCCTCTGAAGGGCACACTCGGCGGAGCCAGAGTGCAGTTCGACAGAGATCACCT
GAGAAGATACCCTCACAAGGTGGAAAGCGGCAACGTGGGCAGAATCTACTTCAACATGACCG
TGAACATCGAGCCTACAGAGTCCCCAGTGTCCAAGTCTCTGAAGATCCACCGGGACGACTTC
CCCAAGGTGGTCAACTTCAAGCCCAAAGAACTGACCGAGTGGATCAAGGACAGCAAGGGCAA
GAAACTGAAGTCCGGCATCGAGTCCCTGGAAATCGGCCTGAGAGTGATGAGCATCGACCTGG
GACAGAGACAGGCCGCTGCCGCCTCTATTTTCGAGGTGGTGGATCAGAAGCCCGACATCGAA
GGCAAGCTGTTTTTCCCAATCAAGGGCACCGAGCTGTATGCCGTGCACAGAGCCAGCTTCAA
CATCAAGCTGCCCGGCGAGACACTGGTCAAGAGCAGAGAAGTGCTGCGGAAGGCCAGAGAGG
ACAATCTGAAACTGATGAACCAGAAGCTCAACTTCCTGCGGAACGTGCTGCACTTCCAGCAG
TTCGAGGACATCACCGAGAGAGAGAAGCGGGTCACCAAGTGGATCAGCAGACAAGAGAACAG
CGACGTGCCCCTGGTGTACCAGGATGAGCTGATCCAGATCCGCGAGCTGATGTACAAGCCTT
ACAAGGACTGGGTCGCCTTCCTGAAGCAGCTCCACAAGAGACTGGAAGTCGAGATCGGCAAA
GAAGTGAAGCACTGGCGGAAGTCCCTGAGCGACGGAAGAAAGGGCCTGTACGGCATCTCCCT
GAAGAACATCGACGAGATCGATCGGACCCGGAAGTTCCTGCTGAGATGGTCCCTGAGGCCTA
CCGAACCTGGCGAAGTGCGTAGACTGGAACCCGGCCAGAGATTCGCCATCGACCAGCTGAAT
CACCTGAACGCCCTGAAAGAAGATCGGCTGAAGAAGATGGCCAACACCATCATCATGCACGC
CCTGGGCTACTGCTACGACGTGCGGAAGAAGAAATGGCAGGCTAAGAACCCCGCCTGCCAGA
TCATCCTGTTCGAGGATCTGAGCAACTACAACCCCTACGAGGAAAGGTCCCGCTTCGAGAAC
AGCAAGCTCATGAAGTGGTCCAGACGCGAGATCCCCAGACAGGTTGCACTGCAGGGCGAGAT
CTATGGCCTGCAAGTGGGAGAAGTGGGCGCTCAGTTCAGCAGCAGATTCCACGCCAAGACAG
GCAGCCCTGGCATCAGATGTAGCGTCGTGACCAAAGAGAAGCTGCAGGACAATCGGTTCTTC
AAGAATCTGCAGAGAGAGGGCAGACTGACCCTGGACAAAATCGCCGTGCTGAAAGAGGGCGA
TCTGTACCCAGACAAAGGCGGCGAGAAGTTCATCAGCCTGAGCAAGGATCGGAAGTGCGTGA
CCACACACGCCGACATCAACGCCGCTCAGAACCTGCAGAAGCGGTTCTGGACAAGAACCCAC
GGCTTCTACAAGGTGTACTGCAAGGCCTACCAGGTGGACGGCCAGACCGTGTACATCCCTGA
GAGCAAGGACCAGAAGCAGAAGATCATCGAAGAGTTCGGCGAGGGCTACTTCATTCTGAAGG
ACGGGGTGTACGAATGGGTCAACGCCGGCAAGCTGAAAATCAAGAAGGGCAGCTCCAAGCAG
AGCAGCAGCGAGCTGGTGGATAGCGACATCCTGAAAGACAGCTTCGACCTGGCCTCCGAGCT
GAAAGGCGAAAAGCTGATGCTGTACAGGGACCCCAGCGGCAATGTGTTCCCCAGCGACAAAT
GGATGGCCGCTGGCGTGTTCTTCGGAAAGCTGGAACGCATCCTGATCAGCAAGCTGACCAAC
CAGTACTCCATCAGCACCATCGAGGACGACAGCAGCAAGCAGTCTATGAAAAGGCCGGCGGC

[chemical structure]

ACGCTTATCCCTACGACGTGCCTGATTATGCATACCCATATGATGTCCCCGACTATGCCTAA
MAPKKKRKVGIHGVPAAATRSFILKIEPNEEVKKGLWKTHEVLNHGIAYYMNILKLIRQEAI
YEHHEQDPKNPKKVSKAEIQAELWDFVLKMQKCNSFTHEVDKDEVFNILRELYEELVPSSVE
KKGEANQLSNKFLYPLVDPNSQSGKGTASSGRKPRWYNLKIAGDPSWEEEKKKWEEDKKKDP
LAKILGKLAEYGLIPLFIPYTDSNEPIVKEIKWMEKSRNQSVRRLDKDMFIQALERFLSWES
WNLKVKEEYEKVEKEYKTLEERIKEDIQALKALEQYEKERQEQLLRDTLNTNEYRLSKRGLR
GWREIIQKWLKMDGGSGGSSEVEFSHEYWMRHALTLAKRARDEREVPVGAVLVLNNRVIGEG
WNRAIGLHDPTAHAEIMALRQGGLVMQNYRLYDATLYVTFEPCVMCAGAMIHSRIGRVVFGV
RNAKTGAAGSLMDVLHHPGMNHRVEITEGILADECAALLCRFFRMPRRVFNAQKKAQSSTDG
SSGSETPGTSESATPESSGENEPSEKYLEVFKDYQRKHPREAGDYSVYEFLSKKENHFIWRN
HPEYPYLYATFCEIDKKKKDAKQQATFTLADPINHPLWVRFEERSGSNLNKYRILTEQLHTE
KLKKKLTVQLDRLIYPTESGGWEEKGKVDIVLLPSRQFYNQIFLDIEEKGKHAFTYKDESIK
FPLKGTLGGARVQFDRDHLRRYPHKVESGNVGRIYFNMTVNIEPTESPVSKSLKIHRDDFPK
VVNFKPKELTEWIKDSKGKKLKSGIESLEIGLRVMSIDLGQRQAAAASIFEVVDQKPDIEGK
LFFPIKGTELYAVHRASFNIKLPGETLVKSREVLRKAREDNLKLMNQKLNFLRNVLHFQQFE
DITEREKRVTKWISRQENSDVPLVYQDELIQIRELMYKPYKDWVAFLKQLHKRLEVEIGKEV
KHWRKSLSDGRKGLYGISLKNIDEIDRTRKFLLRWSLRPTEPGEVRRLEPGQRFAIDQLNHL
NALKEDRLKKMANTIIMHALGYCYDVRKKKWQAKNPACQIILFEDLSNYNPYEERSRFENSK
LMKWSRREIPRQVALQGEIYGLQVGEVGAQFSSRFHAKTGSPGIRCSVVTKEKLQDNRFFKN
LQREGRLTLDKIAVLKEGDLYPDKGGEKFISLSKDRKCVTTHADINAAQNLQKRFWTRTHGF
YKVYCKAYQVDGQTVYIPESKDQKQKIIEEFGEGYFILKDGVYEWVNAGKLKIKKGSSKQSS
SELVDSDILKDSFDLASELKGEKLMLYRDPSGNVFPSDKWMAAGVFFGKLERILISKLTNQY
SISTIEDDSSKQSMKRPAATKKAGQAKKKKGSYPYDVPDYAYPYDVPDYAYPYDVPDYA
BhCas12b GGSGGS-ABE8-Xten20 at D980

[chemical structure]

CAGATCCTTCATCCTGAAGATCGAGCCCAACGAGGAAGTGAAGAAAGGCCTCTGGAAAACCC
ACGAGGTGCTGAACCACGGAATCGCCTACTACATGAATATCCTGAAGCTGATCCGGCAAGAG
GCCATCTACGAGCACCACGAGCAGGACCCCAAGAATCCCAAGAAGGTGTCCAAGGCCGAGAT
CCAGGCCGAGCTGTGGGATTTCGTGCTGAAGATGCAGAAGTGCAACAGCTTCACACACGAGG
TGGACAAGGACGAGGTGTTCAACATCCTGAGAGAGCTGTACGAGGAACTGGTGCCCAGCAGC
GTGGAAAAGAAGGGCGAAGCCAACCAGCTGAGCAACAAGTTTCTGTACCCTCTGGTGGACCC
CAACAGCCAGTCTGGAAAGGGAACAGCCAGCAGCGGCAGAAAGCCCAGATGGTACAACCTGA
AGATTGCCGGCGATCCCTCCTGGGAAGAAGAGAAGAAGAAGTGGGAAGAAGATAAGAAAAAG
GACCCGCTGGCCAAGATCCTGGGCAAGCTGGCTGAGTACGGACTGATCCCTCTGTTCATCCC
CTACACCGACAGCAACGAGCCCATCGTGAAAGAAATCAAGTGGATGGAAAAGTCCCGGAACC
AGAGCGTGCGGCGGCTGGATAAGGACATGTTCATTCAGGCCCTGGAACGGTTCCTGAGCTGG
GAGAGCTGGAACCTGAAAGTGAAAGAGGAATACGAGAAGGTCGAGAAAGAGTACAAGACCCT
GGAAGAGAGGATCAAAGAGGACATCCAGGCTCTGAAGGCTCTGGAACAGTATGAGAAAGAGC
GGCAAGAACAGCTGCTGCGGGACACCCTGAACACCAACGAGTACCGGCTGAGCAAGAGAGGC
CTTAGAGGCTGGCGGGAAATCATCCAGAAATGGCTGAAAATGGACGAGAACGAGCCCTCCGA
GAAGTACCTGGAAGTGTTCAAGGACTACCAGCGGAAGCACCCTAGAGAGGCCGGCGATTACA
GCGTGTACGAGTTCCTGTCCAAGAAAGAGAACCACTTCATCTGGCGGAATCACCCTGAGTAC
CCCTACCTGTACGCCACCTTCTGCGAGATCGACAAGAAAAAGAAGGACGCCAAGCAGCAGGC
CACCTTCACACTGGCCGATCCTATCAATCACCCTCTGTGGGTCCGATTCGAGGAAAGAAGCG
GCAGCAACCTGAACAAGTACAGAATCCTGACCGAGCAGCTGCACACCGAGAAGCTGAAGAAA
AAGCTGACAGTGCAGCTGGACCGGCTGATCTACCCTACAGAATCTGGCGGCTGGGAAGAGAA
GGGCAAAGTGGACATTGTGCTGCTGCCCAGCCGGCAGTTCTACAACCAGATCTTCCTGGACA
TCGAGGAAAAGGGCAAGCACGCCTTCACCTACAAGGATGAGAGCATCAAGTTCCCTCTGAAG
GGCACACTCGGCGGAGCCAGAGTGCAGTTCGACAGAGATCACCTGAGAAGATACCCTCACAA
GGTGGAAAGCGGCAACGTGGGCAGAATCTACTTCAACATGACCGTGAACATCGAGCCTACAG
AGTCCCCAGTGTCCAAGTCTCTGAAGATCCACCGGGACGACTTCCCCAAGGTGGTCAACTTC
AAGCCCAAAGAACTGACCGAGTGGATCAAGGACAGCAAGGGCAAGAAACTGAAGTCCGGCAT
CGAGTCCCTGGAAATCGGCCTGAGAGTGATGAGCATCGACCTGGGACAGAGACAGGCCGCTG
CCGCCTCTATTTTCGAGGTGGTGGATCAGAAGCCCGACATCGAAGGCAAGCTGTTTTTCCCA
ATCAAGGGCACCGAGCTGTATGCCGTGCACAGAGCCAGCTTCAACATCAAGCTGCCCGGCGA
GACACTGGTCAAGAGCAGAGAAGTGCTGCGGAAGGCCAGAGAGGACAATCTGAAACTGATGA
ACCAGAAGCTCAACTTCCTGCGGAACGTGCTGCACTTCCAGCAGTTCGAGGACATCACCGAG
AGAGAGAAGCGGGTCACCAAGTGGATCAGCAGACAAGAGAACAGCGACGTGCCCCTGGTGTA
CCAGGATGAGCTGATCCAGATCCGCGAGCTGATGTACAAGCCTTACAAGGACTGGGTCGCCT
TCCTGAAGCAGCTCCACAAGAGACTGGAAGTCGAGATCGGCAAAGAAGTGAAGCACTGGCGG
AAGTCCCTGAGCGACGGAAGAAAGGGCCTGTACGGCATCTCCCTGAAGAACATCGACGAGAT
CGATCGGACCCGGAAGTTCCTGCTGAGATGGTCCCTGAGGCCTACCGAACCTGGCGAAGTGC
GTAGACTGGAACCCGGCCAGAGATTCGCCATCGACCAGCTGAATCACCTGAACGCCCTGAAA
GAAGATCGGCTGAAGAAGATGGCCAACACCATCATCATGCACGCCCTGGGCTACTGCTACGA
CGTGCGGAAGAAGAAATGGCAGGCTAAGAACCCCGCCTGCCAGATCATCCTGTTCGAGGATC
TGAGCAACTACAACCCCTACGAGGAAAGGTCCCGCTTCGAGAACAGCAAGCTCATGAAGTGG
TCCAGACGCGAGATCCCCAGACAGGTTGCACTGCAGGGCGAGATCTATGGCCTGCAAGTGGG
AGAAGTGGGCGCTCAGTTCAGCAGCAGATTCCACGCCAAGACAGGCAGCCCTGGCATCAGAT
GTAGCGTCGTGACCAAAGAGAAGCTGCAGGACAATCGGTTCTTCAAGAATCTGCAGAGAGAG
GGCAGACTGACCCTGGACAAAATCGCCGTGCTGAAAGAGGGCGATCTGTACCCAGACAAAGG
CGGCGAGAAGTTCATCAGCCTGAGCAAGGATCGGAAGTGCGTGACCACACACGCCGACATCA
ACGCCGCTCAGAACCTGCAGAAGCGGTTCTGGACAAGAACCCACGGCTTCTACAAGGTGTAC

[chemical structure]

[chemical structure]

[chemical structure]

[chemical structure]

[chemical structure]

[chemical structure]

[chemical structure]

[chemical structure]

[chemical structure]

CCTGGCACAAGCGAGAGCGCCACCCCTGAGAGCTCTGGCGGCCAGACCGTGTACATCCCTGA
GAGCAAGGACCAGAAGCAGAAGATCATCGAAGAGTTCGGCGAGGGCTACTTCATTCTGAAGG
ACGGGGTGTACGAATGGGTCAACGCCGGCAAGCTGAAAATCAAGAAGGGCAGCTCCAAGCAG
AGCAGCAGCGAGCTGGTGGATAGCGACATCCTGAAAGACAGCTTCGACCTGGCCTCCGAGCT
GAAAGGCGAAAAGCTGATGCTGTACAGGGACCCCAGCGGCAATGTGTTCCCCAGCGACAAAT
GGATGGCCGCTGGCGTGTTCTTCGGAAAGCTGGAACGCATCCTGATCAGCAAGCTGACCAAC
CAGTACTCCATCAGCACCATCGAGGACGACAGCAGCAAGCAGTCTATGAAAAGGCCGGCGGC

[chemical structure]

ACGCTTATCCCTACGACGTGCCTGATTATGCATACCCATATGATGTCCCCGACTATGCCTAA
MAPKKKRKVGIHGVPAAATRSFILKIEPNEEVKKGLWKTHEVLNHGIAYYMNILKLIRQEAI
YEHHEQDPKNPKKVSKAEIQAELWDFVLKMQKCNSFTHEVDKDEVFNILRELYEELVPSSVE
KKGEANQLSNKFLYPLVDPNSQSGKGTASSGRKPRWYNLKIAGDPSWEEEKKKWEEDKKKDP
LAKILGKLAEYGLIPLFIPYTDSNEPIVKEIKWMEKSRNQSVRRLDKDMFIQALERFLSWES
WNLKVKEEYEKVEKEYKTLEERIKEDIQALKALEQYEKERQEQLLRDTLNTNEYRLSKRGLR
GWREIIQKWLKMDENEPSEKYLEVFKDYQRKHPREAGDYSVYEFLSKKENHFIWRNHPEYPY
LYATFCEIDKKKKDAKQQATFTLADPINHPLWVRFEERSGSNLNKYRILTEQLHTEKLKKKL
TVQLDRLIYPTESGGWEEKGKVDIVLLPSRQFYNQIFLDIEEKGKHAFTYKDESIKFPLKGT
LGGARVQFDRDHLRRYPHKVESGNVGRIYFNMTVNIEPTESPVSKSLKIHRDDFPKVVNFKP
KELTEWIKDSKGKKLKSGIESLEIGLRVMSIDLGQRQAAAASIFEVVDQKPDIEGKLFFPIK
GTELYAVHRASFNIKLPGETLVKSREVLRKAREDNLKLMNQKLNFLRNVLHFQQFEDITERE
KRVTKWISRQENSDVPLVYQDELIQIRELMYKPYKDWVAFLKQLHKRLEVEIGKEVKHWRKS
LSDGRKGLYGISLKNIDEIDRTRKFLLRWSLRPTEPGEVRRLEPGQRFAIDQLNHLNALKED
RLKKMANTIIMHALGYCYDVRKKKWQAKNPACQIILFEDLSNYNPYEERSRFENSKLMKWSR
REIPRQVALQGEIYGLQVGEVGAQFSSRFHAKTGSPGIRCSVVTKEKLQDNRFFKNLQREGR
LTLDKIAVLKEGDLYPDKGGEKFISLSKDRKCVTTHADINAAQNLQKRFWTRTHGFYKVYCK
AYQVDGGSGGSSEVEFSHEYWMRHALTLAKRARDEREVPVGAVLVLNNRVIGEGWNRAIGLH
DPTAHAEIMALRQGGLVMQNYRLYDATLYVTFEPCVMCAGAMIHSRIGRVVFGVRNAKTGAA
GSLMDVLHHPGMNHRVEITEGILADECAALLCRFFRMPRRVFNAQKKAQSSTDGSSGSETPG
TSESATPESSGGQTVYIPESKDQKQKIIEEFGEGYFILKDGVYEWVNAGKLKIKKGSSKQSS
SELVDSDILKDSFDLASELKGEKLMLYRDPSGNVFPSDKWMAAGVFFGKLERILISKLTNQY
SISTIEDDSSKQSMKRPAATKKAGQAKKKKGSYPYDVPDYAYPYDVPDYAYPYDVPDYA
BhCas12b GGSGGS-ABE8-Xten20 at K1019

[chemical structure]

CAGATCCTTCATCCTGAAGATCGAGCCCAACGAGGAAGTGAAGAAAGGCCTCTGGAAAACCC
ACGAGGTGCTGAACCACGGAATCGCCTACTACATGAATATCCTGAAGCTGATCCGGCAAGAG
GCCATCTACGAGCACCACGAGCAGGACCCCAAGAATCCCAAGAAGGTGTCCAAGGCCGAGAT
CCAGGCCGAGCTGTGGGATTTCGTGCTGAAGATGCAGAAGTGCAACAGCTTCACACACGAGG
TGGACAAGGACGAGGTGTTCAACATCCTGAGAGAGCTGTACGAGGAACTGGTGCCCAGCAGC
GTGGAAAAGAAGGGCGAAGCCAACCAGCTGAGCAACAAGTTTCTGTACCCTCTGGTGGACCC
CAACAGCCAGTCTGGAAAGGGAACAGCCAGCAGCGGCAGAAAGCCCAGATGGTACAACCTGA
AGATTGCCGGCGATCCCTCCTGGGAAGAAGAGAAGAAGAAGTGGGAAGAAGATAAGAAAAAG
GACCCGCTGGCCAAGATCCTGGGCAAGCTGGCTGAGTACGGACTGATCCCTCTGTTCATCCC
CTACACCGACAGCAACGAGCCCATCGTGAAAGAAATCAAGTGGATGGAAAAGTCCCGGAACC
AGAGCGTGCGGCGGCTGGATAAGGACATGTTCATTCAGGCCCTGGAACGGTTCCTGAGCTGG
GAGAGCTGGAACCTGAAAGTGAAAGAGGAATACGAGAAGGTCGAGAAAGAGTACAAGACCCT
GGAAGAGAGGATCAAAGAGGACATCCAGGCTCTGAAGGCTCTGGAACAGTATGAGAAAGAGC
GGCAAGAACAGCTGCTGCGGGACACCCTGAACACCAACGAGTACCGGCTGAGCAAGAGAGGC
CTTAGAGGCTGGCGGGAAATCATCCAGAAATGGCTGAAAATGGACGAGAACGAGCCCTCCGA
GAAGTACCTGGAAGTGTTCAAGGACTACCAGCGGAAGCACCCTAGAGAGGCCGGCGATTACA
GCGTGTACGAGTTCCTGTCCAAGAAAGAGAACCACTTCATCTGGCGGAATCACCCTGAGTAC
CCCTACCTGTACGCCACCTTCTGCGAGATCGACAAGAAAAAGAAGGACGCCAAGCAGCAGGC
CACCTTCACACTGGCCGATCCTATCAATCACCCTCTGTGGGTCCGATTCGAGGAAAGAAGCG
GCAGCAACCTGAACAAGTACAGAATCCTGACCGAGCAGCTGCACACCGAGAAGCTGAAGAAA
AAGCTGACAGTGCAGCTGGACCGGCTGATCTACCCTACAGAATCTGGCGGCTGGGAAGAGAA
GGGCAAAGTGGACATTGTGCTGCTGCCCAGCCGGCAGTTCTACAACCAGATCTTCCTGGACA
TCGAGGAAAAGGGCAAGCACGCCTTCACCTACAAGGATGAGAGCATCAAGTTCCCTCTGAAG
GGCACACTCGGCGGAGCCAGAGTGCAGTTCGACAGAGATCACCTGAGAAGATACCCTCACAA
GGTGGAAAGCGGCAACGTGGGCAGAATCTACTTCAACATGACCGTGAACATCGAGCCTACAG
AGTCCCCAGTGTCCAAGTCTCTGAAGATCCACCGGGACGACTTCCCCAAGGTGGTCAACTTC
AAGCCCAAAGAACTGACCGAGTGGATCAAGGACAGCAAGGGCAAGAAACTGAAGTCCGGCAT
CGAGTCCCTGGAAATCGGCCTGAGAGTGATGAGCATCGACCTGGGACAGAGACAGGCCGCTG
CCGCCTCTATTTTCGAGGTGGTGGATCAGAAGCCCGACATCGAAGGCAAGCTGTTTTTCCCA
ATCAAGGGCACCGAGCTGTATGCCGTGCACAGAGCCAGCTTCAACATCAAGCTGCCCGGCGA
GACACTGGTCAAGAGCAGAGAAGTGCTGCGGAAGGCCAGAGAGGACAATCTGAAACTGATGA
ACCAGAAGCTCAACTTCCTGCGGAACGTGCTGCACTTCCAGCAGTTCGAGGACATCACCGAG
AGAGAGAAGCGGGTCACCAAGTGGATCAGCAGACAAGAGAACAGCGACGTGCCCCTGGTGTA
CCAGGATGAGCTGATCCAGATCCGCGAGCTGATGTACAAGCCTTACAAGGACTGGGTCGCCT
TCCTGAAGCAGCTCCACAAGAGACTGGAAGTCGAGATCGGCAAAGAAGTGAAGCACTGGCGG
AAGTCCCTGAGCGACGGAAGAAAGGGCCTGTACGGCATCTCCCTGAAGAACATCGACGAGAT
CGATCGGACCCGGAAGTTCCTGCTGAGATGGTCCCTGAGGCCTACCGAACCTGGCGAAGTGC
GTAGACTGGAACCCGGCCAGAGATTCGCCATCGACCAGCTGAATCACCTGAACGCCCTGAAA
GAAGATCGGCTGAAGAAGATGGCCAACACCATCATCATGCACGCCCTGGGCTACTGCTACGA
CGTGCGGAAGAAGAAATGGCAGGCTAAGAACCCCGCCTGCCAGATCATCCTGTTCGAGGATC
TGAGCAACTACAACCCCTACGAGGAAAGGTCCCGCTTCGAGAACAGCAAGCTCATGAAGTGG
TCCAGACGCGAGATCCCCAGACAGGTTGCACTGCAGGGCGAGATCTATGGCCTGCAAGTGGG
AGAAGTGGGCGCTCAGTTCAGCAGCAGATTCCACGCCAAGACAGGCAGCCCTGGCATCAGAT
GTAGCGTCGTGACCAAAGAGAAGCTGCAGGACAATCGGTTCTTCAAGAATCTGCAGAGAGAG
GGCAGACTGACCCTGGACAAAATCGCCGTGCTGAAAGAGGGCGATCTGTACCCAGACAAAGG
CGGCGAGAAGTTCATCAGCCTGAGCAAGGATCGGAAGTGCGTGACCACACACGCCGACATCA
ACGCCGCTCAGAACCTGCAGAAGCGGTTCTGGACAAGAACCCACGGCTTCTACAAGGTGTAC
TGCAAGGCCTACCAGGTGGACGGCCAGACCGTGTACATCCCTGAGAGCAAGGACCAGAAGCA
GAAGATCATCGAAGAGTTCGGCGAGGGCTACTTCATTCTGAAGGACGGGGTGTACGAATGGG

[chemical structure]

[chemical structure]

[chemical structure]

[chemical structure]

[chemical structure]

[chemical structure]

[chemical structure]

[chemical structure]

[chemical structure]

CAAGCGAGAGCGCCACCCCTGAGAGCTCTGGCCTGAAAATCAAGAAGGGCAGCTCCAAGCAG
AGCAGCAGCGAGCTGGTGGATAGCGACATCCTGAAAGACAGCTTCGACCTGGCCTCCGAGCT
GAAAGGCGAAAAGCTGATGCTGTACAGGGACCCCAGCGGCAATGTGTTCCCCAGCGACAAAT
GGATGGCCGCTGGCGTGTTCTTCGGAAAGCTGGAACGCATCCTGATCAGCAAGCTGACCAAC
CAGTACTCCATCAGCACCATCGAGGACGACAGCAGCAAGCAGTCTATGAAAAGGCCGGCGGC

[chemical structure]

ACGCTTATCCCTACGACGTGCCTGATTATGCATACCCATATGATGTCCCCGACTATGCCTAA
MAPKKKRKVGIHGVPAAATRSFILKIEPNEEVKKGLWKTHEVLNHGIAYYMNILKLIRQEAI
YEHHEQDPKNPKKVSKAEIQAELWDFVLKMQKCNSFTHEVDKDEVFNILRELYEELVPSSVE
KKGEANQLSNKFLYPLVDPNSQSGKGTASSGRKPRWYNLKIAGDPSWEEEKKKWEEDKKKDP
LAKILGKLAEYGLIPLFIPYTDSNEPIVKEIKWMEKSRNQSVRRLDKDMFIQALERFLSWES
WNLKVKEEYEKVEKEYKTLEERIKEDIQALKALEQYEKERQEQLLRDTLNTNEYRLSKRGLR
GWREIIQKWLKMDENEPSEKYLEVFKDYQRKHPREAGDYSVYEFLSKKENHFIWRNHPEYPY
LYATFCEIDKKKKDAKQQATFTLADPINHPLWVRFEERSGSNLNKYRILTEQLHTEKLKKKL
TVQLDRLIYPTESGGWEEKGKVDIVLLPSRQFYNQIFLDIEEKGKHAFTYKDESIKFPLKGT
LGGARVQFDRDHLRRYPHKVESGNVGRIYFNMTVNIEPTESPVSKSLKIHRDDFPKVVNFKP
KELTEWIKDSKGKKLKSGIESLEIGLRVMSIDLGQRQAAAASIFEVVDQKPDIEGKLFFPIK
GTELYAVHRASFNIKLPGETLVKSREVLRKAREDNLKLMNQKLNFLRNVLHFQQFEDITERE
KRVTKWISRQENSDVPLVYQDELIQIRELMYKPYKDWVAFLKQLHKRLEVEIGKEVKHWRKS
LSDGRKGLYGISLKNIDEIDRTRKFLLRWSLRPTEPGEVRRLEPGQRFAIDQLNHLNALKED
RLKKMANTIIMHALGYCYDVRKKKWQAKNPACQIILFEDLSNYNPYEERSRFENSKLMKWSR
REIPRQVALQGEIYGLQVGEVGAQFSSRFHAKTGSPGIRCSVVTKEKLQDNRFFKNLQREGR
LTLDKIAVLKEGDLYPDKGGEKFISLSKDRKCVTTHADINAAQNLQKRFWTRTHGFYKVYCK
AYQVDGQTVYIPESKDQKQKIIEEFGEGYFILKDGVYEWVNAGKGGSGGSSEVEFSHEYWMR
HALTLAKRARDEREVPVGAVLVLNNRVIGEGWNRAIGLHDPTAHAEIMALRQGGLVMQNYRL
YDATLYVTFEPCVMCAGAMIHSRIGRVVFGVRNAKTGAAGSLMDVLHHPGMNHRVEITEGIL
ADECAALLCRFFRMPRRVFNAQKKAQSSTDGSSGSETPGTSESATPESSGLKIKKGSSKQSS
SELVDSDILKDSFDLASELKGEKLMLYRDPSGNVFPSDKWMAAGVFFGKLERILISKLTNQY
SISTIEDDSSKQSMKRPAATKKAGQAKKKKGSYPYDVPDYAYPYDVPDYAYPYDVPDYA

[0305] For the sequences above, the Kozak sequence is bolded and underlined; marks the N-terminal nuclear localization signal (NLS); lower case characters denote the GGGSGGS linker; _ _ _ _, marks the sequence encoding ABE8, unmodified sequence encodes BhCas12b; double underling denotes the Xten20 linker; single underlining denotes the C-terminal NLS; [symbol] denotes GS linker; and italicized characters represent the coding sequence of the 3x hemagglutinin (HA) tag.

### Guide Polynucleotides

[0306] In an embodiment, the guide polynucleotide is a guide RNA. An RNA/Cas complex can assist in “guiding” Cas protein to a target DNA. Cas9/crRNA/tracrRNA endonucleolytically cleaves linear or circular dsDNA target complementary to the spacer. The target strand not complementary to crRNA is first cut endonucleolytically, then trimmed 3′-5′ exonucleolytically. In nature, DNA-binding and cleavage typically requires protein and both RNAs. However, single guide RNAs (“sgRNA,” or simply “gRNA”) can be engineered so as to incorporate aspects of both the crRNA and tracrRNA into a single RNA species. See, e.g., Jinek M. et al., Science 337:816-821(2012), the entire contents of which is hereby incorporated by reference. Cas9 recognizes a short motif in the CRISPR repeat sequences (the PAM or protospacer adjacent motif) to help distinguish self versus non-self. Cas9 nuclease sequences and structures are well known to those of skill in the art (see e.g.,

[0307] “Complete genome sequence of an M1 strain of Streptococcus pyogenes.” Ferretti, J. J. et al., Natl. Acad. Sci. U.S.A. 98:4658-4663(2001); “CRISPR RNA maturation by trans-encoded small RNA and host factor RNase III.” Deltcheva E. et al., Nature 471:602-607(2011); and “Programmable dual-RNA-guided DNA endonuclease in adaptive bacterial immunity.” Jinek M.et al, Science 337:816-821(2012), the entire contents of each of which are incorporated herein by reference). Cas9 orthologs have been described in various species, including, but not limited to, S. pyogenes and S. thermophilus. Additional suitable Cas9 nucleases and sequences can be apparent to those of skill in the art based on this disclosure, and such Cas9 nucleases and sequences include Cas9 sequences from the organisms and loci disclosed in Chylinski, Rhun, and Charpentier, “The tracrRNA and Cas9 families of type II CRISPR-Cas immunity systems” (2013) RNA Biology 10:5, 726-737; the entire contents of which are incorporated herein by reference. In some embodiments, a Cas9 nuclease has an inactive (e.g., an inactivated) DNA cleavage domain, that is, the Cas9 is a nickase.

[0308] In some embodiments, the guide polynucleotide is at least one single guide RNA (“sgRNA” or “gRNA”). In some embodiments, the guide polynucleotide is at least one tracrRNA. In some embodiments, the guide polynucleotide does not require PAM sequence to guide the polynucleotide-programmable DNA-binding domain (e.g., Cas9 or Cpf1) to the target nucleotide sequence.

[0309] The polynucleotide programmable nucleotide binding domain (e.g., a CRISPR-derived domain) of the base editors disclosed herein can recognize a target polynucleotide sequence by associating with a guide polynucleotide. A guide polynucleotide (e.g., gRNA) is typically single-stranded and can be programmed to site-specifically bind (i.e., via complementary base pairing) to a target sequence of a polynucleotide, thereby directing a base editor that is in conjunction with the guide nucleic acid to the target sequence. A guide polynucleotide can be DNA. A guide polynucleotide can be RNA. In some embodiments, the guide polynucleotide comprises natural nucleotides (e.g., adenosine). In some embodiments, the guide polynucleotide comprises non-natural (or unnatural) nucleotides (e.g., peptide nucleic acid or nucleotide analogs). In some embodiments, the targeting region of a guide nucleic acid sequence can be at least 15, 16, 17, 18, 19, 20, 21, 22, 23, 24, 25, 26, 27, 28, 29, or 30 nucleotides in length. A targeting region of a guide nucleic acid can be between 10-30 nucleotides in length, or between 15-25 nucleotides in length, or between 15-20 nucleotides in length.

[0310] In some embodiments, a guide polynucleotide comprises two or more individual polynucleotides, which can interact with one another via for example complementary base pairing (e.g., a dual guide polynucleotide). For example, a guide polynucleotide can comprise a CRISPR RNA (crRNA) and a trans-activating CRISPR RNA (tracrRNA). For example, a guide polynucleotide can comprise one or more trans-activating CRISPR RNA (tracrRNA).

[0311] In type II CRISPR systems, targeting of a nucleic acid by a CRISPR protein (e.g., Cas9) typically requires complementary base pairing between a first RNA molecule (crRNA) comprising a sequence that recognizes the target sequence and a second RNA molecule (trRNA) comprising repeat sequences which forms a scaffold region that stabilizes the guide RNA-CRISPR protein complex. Such dual guide RNA systems can be employed as a guide polynucleotide to direct the base editors disclosed herein to a target polynucleotide sequence.

[0312] In some embodiments, the base editor provided herein utilizes a single guide polynucleotide (e.g., gRNA). In some embodiments, the base editor provided herein utilizes a dual guide polynucleotide (e.g., dual gRNAs). In some embodiments, the base editor provided herein utilizes one or more guide polynucleotide (e.g., multiple gRNA). In some embodiments, a single guide polynucleotide is utilized for different base editors described herein. For example, a single guide polynucleotide can be utilized for an adenosine base editor.

[0313] In other embodiments, a guide polynucleotide can comprise both the polynucleotide targeting portion of the nucleic acid and the scaffold portion of the nucleic acid in a single molecule (i.e., a single-molecule guide nucleic acid). For example, a single-molecule guide polynucleotide can be a single guide RNA (sgRNA or gRNA). Herein the term guide polynucleotide sequence contemplates any single, dual or multi-molecule nucleic acid capable of interacting with and directing a base editor to a target polynucleotide sequence.

[0314] Typically, a guide polynucleotide (e.g., crRNA/trRNA complex or a gRNA) comprises a “polynucleotide-targeting segment” that includes a sequence capable of recognizing and binding to a target polynucleotide sequence, and a “protein-binding segment” that stabilizes the guide polynucleotide within a polynucleotide programmable nucleotide binding domain component of a base editor. In some embodiments, the polynucleotide targeting segment of the guide polynucleotide recognizes and binds to a DNA polynucleotide, thereby facilitating the editing of a base in DNA. In other embodiments, the polynucleotide targeting segment of the guide polynucleotide recognizes and binds to an RNA polynucleotide, thereby facilitating the editing of a base in RNA. Herein a “segment” refers to a section or region of a molecule, e.g., a contiguous stretch of nucleotides in the guide polynucleotide. A segment can also refer to a region/section of a complex such that a segment can comprise regions of more than one molecule. For example, where a guide polynucleotide comprises multiple nucleic acid molecules, the protein-binding segment of can include all or a portion of multiple separate molecules that are for instance hybridized along a region of complementarity. In some embodiments, a protein-binding segment of a DNA-targeting RNA that comprises two separate molecules can comprise (i) base pairs 40-75 of a first RNA molecule that is 100 base pairs in length; and (ii) base pairs 10-25 of a second RNA molecule that is 50 base pairs in length. The definition of “segment,” unless otherwise specifically defined in a particular context, is not limited to a specific number of total base pairs, is not limited to any particular number of base pairs from a given RNA molecule, is not limited to a particular number of separate molecules within a complex, and can include regions of RNA molecules that are of any total length and can include regions with complementarity to other molecules.

[0315] A guide RNA or a guide polynucleotide can comprise two or more RNAs, e.g., CRISPR RNA (crRNA) and transactivating crRNA (tracrRNA). In some embodiments, a guide RNA or a guide polynucleotide comprises a single-chain RNA, or single guide RNA (sgRNA) formed by fusion of a portion (e.g., a functional portion) of crRNA and tracrRNA. A guide RNA or a guide polynucleotide can also be a dual RNA comprising a crRNA and a tracrRNA. Furthermore, a crRNA can hybridize with a target DNA.

[0316] As discussed above, a guide RNA or a guide polynucleotide can be an expression product. For example, a DNA that encodes a guide RNA can be a vector comprising a sequence coding for the guide RNA. A guide RNA or a guide polynucleotide can be transferred into a cell by transfecting the cell with an isolated guide RNA or plasmid DNA comprising a sequence coding for the guide RNA and a promoter. A guide RNA or a guide polynucleotide can also be transferred into a cell in other way, such as using virus-mediated gene delivery.

[0317] A guide RNA or a guide polynucleotide can be isolated. For example, a guide RNA can be transfected in the form of an isolated RNA into a cell or organism. A guide RNA can be prepared by in vitro transcription using any in vitro transcription system known in the art. A guide RNA can be transferred to a cell in the form of isolated RNA rather than in the form of plasmid comprising encoding sequence for a guide RNA.

[0318] A guide RNA or a guide polynucleotide can comprise three regions: a first region at the 5′ end that can be complementary to a target site in a chromosomal sequence, a second internal region that can form a stem loop structure, and a third 3′ region that can be single-stranded. A first region of each guide RNA can also be different such that each guide RNA guides a fusion protein to a specific target site. Further, second and third regions of each guide RNA can be identical in all guide RNAs.

[0319] A first region of a guide RNA or a guide polynucleotide can be complementary to sequence at a target site in a chromosomal sequence such that the first region of the guide RNA can base pair with the target site. In some embodiments, a first region of a guide RNA can comprise from or from about 10 nucleotides to 25 nucleotides (i.e., from 10 nucleotides to nucleotides; or from about 10 nucleotides to about 25 nucleotides; or from 10 nucleotides to about 25 nucleotides; or from about 10 nucleotides to 25 nucleotides) or more. For example, a region of base pairing between a first region of a guide RNA and a target site in a chromosomal sequence can be or can be about 10, 11, 12, 13, 14, 15, 16, 17, 18, 19, 20, 22, 23, 24, 25, or more nucleotides in length. In some embodiments, a first region of a guide RNA can be or can be about 19, 20, or 21 nucleotides in length.

[0320] A guide RNA or a guide polynucleotide can also comprise a second region that forms a secondary structure. For example, a secondary structure formed by a guide RNA can comprise a stem (or hairpin) and a loop. A length of a loop and a stem can vary. For example, a loop can range from or from about 3 to 10 nucleotides in length, and a stem can range from or from about 6 to 20 base pairs in length. A stem can comprise one or more bulges of 1 to 10 or about 10 nucleotides. The overall length of a second region can range from or from about 16 to 60 nucleotides in length. For example, a loop can be or can be about 4 nucleotides in length and a stem can be or can be about 12 base pairs.

[0321] A guide RNA or a guide polynucleotide can also comprise a third region at the 3′ end that can be essentially single-stranded. For example, a third region is sometimes not complementarity to any chromosomal sequence in a cell of interest and is sometimes not complementarity to the rest of a guide RNA. Further, the length of a third region can vary. A third region can be more than or more than about 4 nucleotides in length. For example, the length of a third region can range from or from about 5 to 60 nucleotides in length.

[0322] A guide RNA or a guide polynucleotide can target any exon or intron of a gene target. In some embodiments, a guide can target exon 1 or 2 of a gene; in other embodiments, a guide can target exon 3 or 4 of a gene. A composition can comprise multiple guide RNAs that all target the same exon or in some embodiments, multiple guide RNAs that can target different exons. An exon and an intron of a gene can be targeted.

[0323] A guide RNA or a guide polynucleotide can target a nucleic acid sequence of about 20 nucleotides. A target nucleic acid can be less than about 20 nucleotides. A target nucleic acid can be at least about 5, 10, 15, 16, 17, 18, 19, 20, 21, 22, 23, 24, 25, 30, or anywhere between 1-100 nucleotides in length. A target nucleic acid can be at most about 5, 10, 15, 16, 17, 18, 19, 20, 21, 22, 23, 24, 25, 30, 40, 50, or anywhere between 1-100 nucleotides in length. A target nucleic acid sequence can be or can be about 20 bases immediately 5′ of the first nucleotide of the PAM. A guide RNA can target a nucleic acid sequence. A target nucleic acid can be at least or at least about 1-10, 1-20, 1-30, 1-40, 1-50, 1-60, 1-70, 1-80, 1-90, or 1-100 nucleotides.

[0324] A guide polynucleotide, for example, a guide RNA, can refer to a nucleic acid that can hybridize to another nucleic acid, for example, the target nucleic acid or protospacer in the genome of a cell. A guide polynucleotide can be RNA. A guide polynucleotide can be DNA. The guide polynucleotide can be programmed or designed to site-specifically bind to a sequence of nucleic acid. A guide polynucleotide can comprise a polynucleotide chain and can be called a single guide polynucleotide. A guide polynucleotide can comprise two polynucleotide chains and can be called a double guide polynucleotide. A guide RNA can be introduced into a cell or embryo as an RNA molecule. For example, a RNA molecule can be transcribed in vitro and/or can be chemically synthesized. An RNA can be transcribed from a synthetic DNA molecule, e.g., a gBlocks® gene fragment. A guide RNA can then be introduced into a cell or embryo as an RNA molecule. A guide RNA can also be introduced into a cell or embryo in the form of a non-RNA nucleic acid molecule, e.g., DNA molecule. For example, a DNA encoding a guide RNA can be operably linked to promoter control sequence for expression of the guide RNA in a cell or embryo of interest. A RNA coding sequence can be operably linked to a promoter sequence that is recognized by RNA polymerase III (Pol III). Plasmid vectors that can be used to express guide RNA include, but are not limited to, px330 vectors and px333 vectors. In some embodiments, a plasmid vector (e.g., px333 vector) can comprise at least two guide RNA-encoding DNA sequences.

[0325] Methods for selecting, designing, and validating guide polynucleotides, e.g., guide RNAs and targeting sequences are described herein and known to those skilled in the art. For example, to minimize the impact of potential substrate promiscuity of a deaminase domain in the nucleobase editor system (e.g., an AID domain), the number of residues that could unintentionally be targeted for deamination (e.g., off-target C residues that could potentially reside on ssDNA within the target nucleic acid locus) may be minimized. In addition, software tools can be used to optimize the gRNAs corresponding to a target nucleic acid sequence, e.g., to minimize total off-target activity across the genome. For example, for each possible targeting domain choice using S. pyogenes Cas9, all off-target sequences (preceding selected PAMs, e.g., NAG or NGG) may be identified across the genome that contain up to certain number (e.g., 1, 2, 3, 4, 5, 6, 7, 8, 9, or 10) of mismatched base-pairs. First regions of gRNAs complementary to a target site can be identified, and all first regions (e.g., crRNAs) can be ranked according to its total predicted off-target score; the top-ranked targeting domains represent those that are likely to have the greatest on-target and the least off-target activity. Candidate targeting gRNAs can be functionally evaluated by using methods known in the art and/or as set forth herein.

[0326] As a non-limiting example, target DNA hybridizing sequences in crRNAs of a guide RNA for use with Cas9s may be identified using a DNA sequence searching algorithm.

[0327] gRNA design may be carried out using custom gRNA design software based on the public tool cas-offinder as described in Bae S., Park J., & Kim J.-S. Cas-OFFinder: A fast and versatile algorithm that searches for potential off-target sites of Cas9 RNA-guided endonucleases. Bioinformatics 30, 1473-1475 (2014). This software scores guides after calculating their genome-wide off-target propensity. Typically matches ranging from perfect matches to 7 mismatches are considered for guides ranging in length from 17 to 24. Once the off-target sites are computationally-determined, an aggregate score is calculated for each guide and summarized in a tabular output using a web-interface. In addition to identifying potential target sites adjacent to PAM sequences, the software also identifies all PAM adjacent sequences that differ by 1, 2, 3 or more than 3 nucleotides from the selected target sites. Genomic DNA sequences for a target nucleic acid sequence, e.g., a target gene may be obtained and repeat elements may be screened using publicly available tools, for example, the RepeatMasker program. RepeatMasker searches input DNA sequences for repeated elements and regions of low complexity. The output is a detailed annotation of the repeats present in a given query sequence.

[0328] Following identification, first regions of guide RNAs, e.g., crRNAs, may be ranked into tiers based on their distance to the target site, their orthogonality and presence of 5′ nucleotides for close matches with relevant PAM sequences (for example, a 5′ G based on identification of close matches in the human genome containing a relevant PAM e.g., NGG PAM for S. pyogenes, NNGRRT or NNGRRV PAM for S. aureus). As used herein, orthogonality refers to the number of sequences in the human genome that contain a minimum number of mismatches to the target sequence. A “high level of orthogonality” or “good orthogonality” may, for example, refer to 20-mer targeting domains that have no identical sequences in the human genome besides the intended target, nor any sequences that contain one or two mismatches in the target sequence. Targeting domains with good orthogonality may be selected to minimize off-target DNA cleavage.

[0329] In some embodiments, a reporter system may be used for detecting base-editing activity and testing candidate guide polynucleotides. In some embodiments, a reporter system may comprise a reporter gene based assay where base editing activity leads to expression of the reporter gene. For example, a reporter system may include a reporter gene comprising a deactivated start codon, e.g., a mutation on the template strand from 3′-TAC-S′ to 3′-CAC-S′. Upon successful deamination of the target C, the corresponding mRNA will be transcribed as 5′-AUG-3′ instead of 5′-GUG-3′, enabling the translation of the reporter gene. Suitable reporter genes will be apparent to those of skill in the art. Non-limiting examples of reporter genes include gene encoding green fluorescence protein (GFP), red fluorescence protein (RFP), luciferase, secreted alkaline phosphatase (SEAP), or any other gene whose expression are detectable and apparent to those skilled in the art. The reporter system can be used to test many different gRNAs, e.g., to determine which residue(s) in the target DNA sequence the respective deaminase will target. sgRNAs that target non-template strand nucleotide residues can also be tested in order to assess off-target effects of a specific base editing protein, e.g., a Cas9 deaminase fusion protein. In some embodiments, such gRNAs can be designed such that the mutated start codon will not hybridize with the gRNA. The guide polynucleotides can comprise standard nucleotides, modified nucleotides (e.g., pseudouridine), nucleotide isomers, and/or nucleotide analogs. In some embodiments, the guide polynucleotide can comprise at least one detectable label. The detectable label can be a fluorophore (e.g., FAM, TMR, Cy3, Cy5, Texas Red, Oregon Green, Alexa Fluors, Halo tags, or any other suitable fluorescent dye), a detection tag (e.g., biotin, digoxigenin, and the like), quantum dots, or gold particles.

[0330] The guide polynucleotides can be synthesized chemically and/or enzymatically. For example, the guide RNA can be synthesized using standard phosphoramidite-based solid-phase synthesis methods. Alternatively, the guide RNA can be synthesized in vitro by operably linking DNA encoding the guide RNA to a promoter control sequence that is recognized by a phage RNA polymerase. Examples of suitable phage promoter sequences include T7, T3, SP6 promoter sequences, or variations thereof. In embodiments in which the guide RNA comprises two separate molecules (e.g., crRNA and tracrRNA), the crRNA can be chemically synthesized and the tracrRNA can be enzymatically synthesized.

[0331] In some embodiments, a base editor system may comprise multiple guide polynucleotides, e.g., gRNAs, that target the base editor to one or more loci (e.g., at least 1 gRNA, at least 2 gRNA, at least 5 gRNA, at least 10 gRNA, at least 20 gRNA, at least 30 g RNA, or at least 50 gRNA). In some embodiments, the multiple gRNA sequences can be tandemly arranged in a single polynucleotide. In some embodiments, tandemly arranged gRNA sequences are separated by a direct repeat.

[0332] A DNA sequence encoding a guide RNA or guide polynucleotide can also be part of a vector. Further, a vector can comprise additional expression control sequences (e.g., enhancer sequences, Kozak sequences, polyadenylation sequences, transcriptional termination sequences, etc.), selectable marker sequences (e.g., GFP or antibiotic resistance genes such as puromycin), origins of replication, and the like. A DNA molecule encoding a guide RNA or guide polynucleotide can be linear or circular.

[0333] In some embodiments, one or more components of a base editor system may be encoded by DNA sequences. Such DNA sequences may be introduced into an expression system, e.g., a cell, together or separately. For example, DNA sequences encoding a polynucleotide programmable nucleotide binding domain and a guide RNA may be introduced into a cell, each DNA sequence can be part of a separate molecule (e.g., one vector containing the polynucleotide programmable nucleotide binding domain coding sequence and a second vector containing the guide RNA coding sequence) or both can be part of a same molecule (e.g., one vector containing coding (and regulatory) sequence for both the polynucleotide programmable nucleotide binding domain and the guide RNA).

[0334] A guide polynucleotide can comprise one or more modifications to provide a nucleic acid with a new or enhanced feature. A guide polynucleotide can comprise a nucleic acid affinity tag. A guide polynucleotide can comprise synthetic nucleotide, synthetic nucleotide analog, nucleotide derivatives, and/or modified nucleotides.

[0335] In some embodiments, a gRNA or a guide polynucleotide can comprise modifications. A modification can be made at any location of a gRNA or a guide polynucleotide. More than one modification can be made to a single gRNA or a guide polynucleotide. A gRNA or a guide polynucleotide can undergo quality control after a modification. In some embodiments, quality control can include PAGE, HPLC, MS, or any combination thereof.

[0336] A modification of a gRNA or a guide polynucleotide can be a substitution, insertion, deletion, chemical modification, physical modification, stabilization, purification, or any combination thereof.

[0337] A gRNA or guide polynucleotide can also be modified by 5′adenylate, 5′ guanosine-triphosphate cap, 5′N7-Methylguanosine-triphosphate cap, 5′triphosphate cap, 3′phosphate, 3′thiophosphate, 5′phosphate, 5′thiophosphate, Cis-Syn thymidine dimer, trimers, C12 spacer, C3 spacer, C6 spacer, dSpacer, PC spacer, rSpacer, Spacer 18, Spacer 9,3′-3′ modifications, 5′-5′ modifications, abasic, acridine, azobenzene, biotin, biotin BB, biotin TEG, cholesteryl TEG, desthiobiotin TEG, DNP TEG, DNP-X, DOTA, dT-Biotin, dual biotin, PC biotin, psoralen C2, psoralen C6, TINA, 3′DABCYL, black hole quencher 1, black hole quencer 2, DABCYL SE, dT-DABCYL, IRDye QC-1, QSY-21, QSY-35, QSY-7, QSY-9, carboxyl linker, thiol linkers, 2′-deoxyribonucleoside analog purine, 2′-deoxyribonucleoside analog pyrimidine, ribonucleoside analog, 2′-0-methyl ribonucleoside analog, sugar modified analogs, wobble/universal bases, fluorescent dye label, 2′-fluoro RNA, 2′-O-methyl RNA, methylphosphonate, phosphodiester DNA, phosphodiester RNA, phosphothioate DNA, phosphorothioate RNA, UNA, pseudouridine-5′-triphosphate, 5′-methylcytidine-5′-triphosphate, or any combination thereof.

[0338] In some embodiments, a modification is permanent. In other embodiments, a modification is transient. In some embodiments, multiple modifications are made to a gRNA or guide polynucleotide. A gRNA or guide polynucleotide modification can alter physiochemical properties of a nucleotide, such as their conformation, polarity, hydrophobicity, chemical reactivity, base-pairing interactions, or any combination thereof.

[0339] The PAM sequence can be any PAM sequence known in the art. Suitable PAM sequences include, but are not limited to, NGG, NGA, NGC, NGN, NGT, NGCG, NGAG, NGAN, NGNG, NGCN, NGCG, NGTN, NNGRRT, NNNRRT, NNGRR(N), TTTV, TYCV, TYCV, TATV, NNNNGATT, NNAGAAW, or NAAAAC. Y is a pyrimidine; N is any nucleotide base; W is A or T.

[0340] A modification can also be a phosphorothioate substitute. In some embodiments, a natural phosphodiester bond can be susceptible to rapid degradation by cellular nucleases and; a modification of internucleotide linkage using phosphorothioate (PS) bond substitutes can be more stable towards hydrolysis by cellular degradation. A modification can increase stability in a gRNA or a guide polynucleotide. A modification can also enhance biological activity. In some embodiments, a phosphorothioate enhanced RNA gRNA can inhibit RNase A, RNase T1, calf serum nucleases, or any combinations thereof. These properties can allow the use of PS-RNA gRNAs to be used in applications where exposure to nucleases is of high probability in vivo or in vitro. For example, phosphorothioate (PS) bonds can be introduced between the last 3-5 nucleotides at the 5′- or ‘3-end of a gRNA which can inhibit exonuclease degradation. In some embodiments, phosphorothioate bonds can be added throughout an entire gRNA to reduce attack by endonucleases.

### Protospacer Adjacent Motif

[0341] The term “protospacer adjacent motif (PAM)” or PAM-like motif refers to a 2-6 base pair DNA sequence immediately following the DNA sequence targeted by the Cas9 nuclease in the CRISPR bacterial adaptive immune system. In some embodiments, the PAM can be a 5′ PAM (i.e., located upstream of the 5′ end of the protospacer). In other embodiments, the PAM can be a 3′ PAM (i.e., located downstream of the 5′ end of the protospacer).

[0342] The PAM sequence is essential for target binding, but the exact sequence depends on a type of Cas protein.

[0343] A base editor provided herein can comprise a CRISPR protein-derived domain that is capable of binding a nucleotide sequence that contains a canonical or non-canonical protospacer adjacent motif (PAM) sequence. A PAM site is a nucleotide sequence in proximity to a target polynucleotide sequence. Some aspects of the disclosure provide for base editors comprising all or a portion of CRISPR proteins that have different PAM specificities.

[0344] For example, typically Cas9 proteins, such as Cas9 from S. pyogenes (spCas9), require a canonical NGG PAM sequence to bind a particular nucleic acid region, where the “N” in “NGG” is adenine (A), thymine (T), guanine (G), or cytosine (C), and the G is guanine. A PAM can be CRISPR protein-specific and can be different between different base editors comprising different CRISPR protein-derived domains. A PAM can be 5′ or 3′ of a target sequence. A PAM can be upstream or downstream of a target sequence. A PAM can be 1, 2, 3, 4, 5, 6, 7, 8, 9, 10 or more nucleotides in length. Often, a PAM is between 2-6 nucleotides in length. Several PAM variants are described in Table 2 below.

TABLE 2
Cas9 proteins and corresponding PAM sequences

| Variant | PAM |
|---|---|
| spCas9 | NGG |
| spCas9-VRQR | NGA |
| spCas9-VRER | NGCG |
| xCas9 (sp) | NGN |
| saCas9 | NNGRRT |
| saCas9-KKH | NNNRRT |
| spCas9-MQKSER | NGCG |
| spCas9-MQKSER | NGCN |
| spCas9-LRKIQK | NGTN |
| spCas9-LRVSQK | NGTN |
| spCas9-LRVSQL | NGTN |
| spCas9-MQKFRAER | NGC |
| Cpf1 | 5′ (TTTV) |
| SpyMac | 5′-NAA-3′ |

[0345] In some embodiments, the PAM is NGC. In some embodiments, the NGC PAM is recognized by a Cas9 variant. In some embodiments, the NGC PAM variant includes one or more amino acid substitutions selected from D1135M, S1136Q, G1218K, E1219F, A1322R, D1332A, R1335E, and T1337R (collectively termed “MQKFRAER”).

[0346] In some embodiments, the PAM is NGT. In some embodiments, the NGT PAM is recognized by a Cas9 variant. In some embodiments, the NGT PAM variant is generated through targeted mutations at one or more residues 1335, 1337, 1135, 1136, 1218, and/or 1219. In some embodiments, the NGT PAM variant is created through targeted mutations at one or more residues 1219, 1335, 1337, 1218. In some embodiments, the NGT PAM variant is created through targeted mutations at one or more residues 1135, 1136, 1218, 1219, and 1335. In some embodiments, the NGT PAM variant is selected from the set of targeted mutations provided in Tables 3A and 3B below.

TABLE 3A
NGT PAM Variant Mutations at residues
1219, 1335, 1337, 1218

| Variant | E1219V | R1335Q | T1337 | G1218 |
|---|---|---|---|---|
| 1 | F | V | T | |
| 2 | F | V | R | |
| 3 | F | V | Q | |
| 4 | F | V | L | |
| 5 | F | V | T | R |
| 6 | F | V | R | R |
| 7 | F | V | Q | R |
| 8 | F | V | L | R |
| 9 | L | L | T | |
| 10 | L | L | R | |
| 11 | L | L | Q | |
| 12 | L | L | L | |
| 13 | F | I | T | |
| 14 | F | I | R | |
| 15 | F | I | Q | |
| 16 | F | I | L | |
| 17 | F | G | C | |
| 18 | H | L | N | |
| 19 | F | G | C | A |
| 20 | H | L | N | V |
| 21 | L | A | W | |
| 22 | L | A | F | |
| 23 | L | A | Y | |
| 24 | I | A | W | |
| 25 | I | A | F | |
| 26 | I | A | Y | |

TABLE 3B
NGT PAM Variant Mutations at residues 1135, 1136,
1218, 1219, and 1335

| Variant | D1135L | S1136R | G1218S | E1219V | R1335Q |
|---|---|---|---|---|---|
| 27 | G | | | | |
| 28 | V | | | | |
| 29 | I | | | | |
| 30 | | A | | | |
| 31 | | W | | | |
| 32 | | H | | | |
| 33 | | K | | | |
| 34 | | | K | | |
| 35 | | | R | | |
| 36 | | | Q | | |
| 37 | | | T | | |
| 38 | | | N | | |
| 39 | | | | I | |
| 40 | | | | A | |
| 41 | | | | N | |
| 42 | | | | Q | |
| 43 | | | | G | |
| 44 | | | | L | |
| 45 | | | | S | |
| 46 | | | | T | |
| 47 | | | | | L |
| 48 | | | | | I |
| 49 | | | | | V |
| 50 | | | | | N |
| 51 | | | | | S |
| 52 | | | | | T |
| 53 | | | | | F |
| 54 | | | | | Y |
| 55 | N1286Q | I1331F | | | |

[0347] In some embodiments, the NGT PAM variant is selected from variant 5, 7, 28, 31, or 36 in Tables 2 and 3. In some embodiments, the variants have improved NGT PAM recognition.

[0348] In some embodiments, the NGT PAM variants have mutations at residues 1219, 1335, 1337, and/or 1218. In some embodiments, the NGT PAM variant is selected with mutations for improved recognition from the variants provided in Table 4 below.

TABLE 4
NGT PAM Variant Mutations at residues 1219,
1335, 1337, and 1218

| Variant | E1219V | R1335Q | T1337 | G1218 |
|---|---|---|---|---|
| 1 | F | V | T | |
| 2 | F | V | R | |
| 3 | F | V | Q | |
| 4 | F | V | L | |
| 5 | F | V | T | R |
| 6 | F | V | R | R |
| 7 | F | V | Q | R |
| 8 | F | V | L | R |

[0349] In some embodiments, base editors with specificity for NGT PAM may be generated as provided in Table 5 below.

TABLE 5
NGT PAM variants

| | NGTN variant | D1135 | S1136 | G1218 | E1219 | A1322R | R1335 | T1337 |
|---|---|---|---|---|---|---|---|---|
| Variant 1 | LRKIQK | L | R | K | I | — | Q | K |
| Variant 2 | LRSVQK | L | R | S | V | — | Q | K |
| Variant 3 | LRSVQL | L | R | S | V | — | Q | L |
| Variant 4 | LRKIRQK | L | R | K | I | R | Q | K |
| Variant 5 | LRSVRQK | L | R | S | V | R | Q | K |
| Variant 6 | LRSVRQL | L | R | S | V | R | Q | L |

[0350] In some embodiments the NGTN variant is variant 1. In some embodiments, the NGTN variant is variant 2. In some embodiments, the NGTN variant is variant 3. In some embodiments, the NGTN variant is variant 4. In some embodiments, the NGTN variant is variant 5. In some embodiments, the NGTN variant is variant 6.

[0351] In some embodiments, the Cas9 domain is a Cas9 domain from Streptococcus pyogenes (SpCas9). In some embodiments, the SpCas9 domain is a nuclease active SpCas9, a nuclease inactive SpCas9 (SpCas9d), or a SpCas9 nickase (SpCas9n). In some embodiments, the SpCas9 comprises a D9X mutation, or a corresponding mutation in any of the amino acid sequences provided herein, wherein X is any amino acid except for D. In some embodiments, the SpCas9 comprises a D9A mutation, or a corresponding mutation in any of the amino acid sequences provided herein. In some embodiments, the SpCas9 domain, the SpCas9d domain, or the SpCas9n domain can bind to a nucleic acid sequence having a non-canonical PAM. In some embodiments, the SpCas9 domain, the SpCas9d domain, or the SpCas9n domain can bind to a nucleic acid sequence having an NGG, a NGA, or a NGCG PAM sequence. In some embodiments, the SpCas9 domain comprises one or more of a D1134X, a R1335X, and a T1336X mutation, or a corresponding mutation in any of the amino acid sequences provided herein, wherein X is any amino acid. In some embodiments, the SpCas9 domain comprises one or more of a D1134E, R1335Q, and T1336R mutation, or a corresponding mutation in any of the amino acid sequences provided herein. In some embodiments, the SpCas9 domain comprises a D1134E, a R1335Q, and a T1336R mutation, or corresponding mutations in any of the amino acid sequences provided herein. In some embodiments, the SpCas9 domain comprises one or more of a D1134X, a R1335X, and a T1336X mutation, or a corresponding mutation in any of the amino acid sequences provided herein, wherein X is any amino acid. In some embodiments, the SpCas9 domain comprises one or more of a D1134V, a R1335Q, and a T1336R mutation, or a corresponding mutation in any of the amino acid sequences provided herein. In some embodiments, the SpCas9 domain comprises a D1134V, a R1335Q, and a T1336R mutation, or corresponding mutations in any of the amino acid sequences provided herein. In some embodiments, the SpCas9 domain comprises one or more of a D1134X, a G1217X, a R1335X, and a T1336X mutation, or a corresponding mutation in any of the amino acid sequences provided herein, wherein X is any amino acid. In some embodiments, the SpCas9 domain comprises one or more of a D1134V, a G1217R, a R1335Q, and a T1336R mutation, or a corresponding mutation in any of the amino acid sequences provided herein. In some embodiments, the SpCas9 domain comprises a D1134V, a G1217R, a R1335Q, and a T1336R mutation, or corresponding mutations in any of the amino acid sequences provided herein.

[0352] In some embodiments, the Cas9 domains of any of the fusion proteins provided herein comprises an amino acid sequence that is at least 60%, at least 65%, at least 70%, at least 75%, at least 80%, at least 85%, at least 90%, at least 95%, at least 96%, at least 97%, at least 98%, at least 99%, or at least 99.5% identical to a Cas9 polypeptide described herein. In some embodiments, the Cas9 domains of any of the fusion proteins provided herein comprises the amino acid sequence of any Cas9 polypeptide described herein. In some embodiments, the Cas9 domains of any of the fusion proteins provided herein consists of the amino acid sequence of any Cas9 polypeptide described herein.

[0353] In some examples, a PAM recognized by a CRISPR protein-derived domain of a base editor disclosed herein can be provided to a cell on a separate oligonucleotide to an insert (e.g., an AAV insert) encoding the base editor. In such embodiments, providing PAM on a separate oligonucleotide can allow cleavage of a target sequence that otherwise would not be able to be cleaved, because no adjacent PAM is present on the same polynucleotide as the target sequence.

[0354] In an embodiment, S. pyogenes Cas9 (SpCas9) can be used as a CRISPR endonuclease for genome engineering. However, others can be used. In some embodiments, a different endonuclease can be used to target certain genomic targets. In some embodiments, synthetic SpCas9-derived variants with non-NGG PAM sequences can be used. Additionally, other Cas9 orthologues from various species have been identified and these “non-SpCas9s” can bind a variety of PAM sequences that can also be useful for the present disclosure. For example, the relatively large size of SpCas9 (approximately 4kb coding sequence) can lead to plasmids carrying the SpCas9 cDNA that cannot be efficiently expressed in a cell. Conversely, the coding sequence for Staphylococcus aureus Cas9 (SaCas9) is approximately 1 kilobase shorter than SpCas9, possibly allowing it to be efficiently expressed in a cell. Similar to SpCas9, the SaCas9 endonuclease is capable of modifying target genes in mammalian cells in vitro and in mice in vivo. In some embodiments, a Cas protein can target a different PAM sequence. In some embodiments, a target gene can be adjacent to a Cas9 PAM, 5′-NGG, for example. In other embodiments, other Cas9 orthologs can have different PAM requirements. For example, other PAMs such as those of S. thermophilus (5′-NNAGAA for CRISPR1 and 5′-NGGNG for CRISPR3) and Neisseria meningiditis (5′-NNNNGATT) can also be found adjacent to a target gene.

[0355] In some embodiments, for a S. pyogenes system, a target gene sequence can precede (i.e., be 5′ to) a 5′-NGG PAM, and a 20-nt guide RNA sequence can base pair with an opposite strand to mediate a Cas9 cleavage adjacent to a PAM. In some embodiments, an adjacent cut can be or can be about 3 base pairs upstream of a PAM. In some embodiments, an adjacent cut can be or can be about 10 base pairs upstream of a PAM. In some embodiments, an adjacent cut can be or can be about 0-20 base pairs upstream of a PAM. For example, an adjacent cut can be next to, 1, 2, 3, 4, 5, 6, 7, 8, 9, 10, 11, 12, 13, 14, 15, 16, 17, 18, 19, 20, 21, 22, 23, 24, 25, 26, 27, 28, 29, or 30 base pairs upstream of a PAM. An adjacent cut can also be downstream of a PAM by 1 to 30 base pairs. The sequences of exemplary SpCas9 proteins capable of binding a PAM sequence follow:

[0356] The amino acid sequence of an exemplary PAM-binding SpCas9 is as follows:

MDKKYSIGLDIGTNSVGWAVITDEYKVPSKKFKVLGNTDRHSIKKNLIGALLFDSGETAEAT
RLKRTARRRYTRRKNRICYLQEIFSNEMAKVDDSFFHRLEESFLVEEDKKHERHPIFGNIVD
EVAYHEKYPTIYHLRKKLVDSTDKADLRLIYLALAHMIKFRGHFLIEGDLNPDNSDVDKLFI
QLVQTYNQLFEENPINASGVDAKAILSARLSKSRRLENLIAQLPGEKKNGLFGNLIALSLGL
TPNFKSNFDLAEDAKLQLSKDTYDDDLDNLLAQIGDQYADLFLAAKNLSDAILLSDILRVNT
EITKAPLSASMIKRYDEHHQDLTLLKALVRQQLPEKYKEIFFDQSKNGYAGYIDGGASQEEF
YKFIKPILEKMDGTEELLVKLNREDLLRKQRTFDNGSIPHQIHLGELHAILRRQEDFYPFLK
DNREKIEKILTFRIPYYVGPLARGNSRFAWMTRKSEETITPWNFEEVVDKGASAQSFIERMT
NFDKNLPNEKVLPKHSLLYEYFTVYNELTKVKYVTEGMRKPAFLSGEQKKAIVDLLFKTNRK
VTVKQLKEDYFKKIECFDSVEISGVEDRFNASLGTYHDLLKIIKDKDFLDNEENEDILEDIV
LTLTLFEDREMIEERLKTYAHLFDDKVMKQLKRRRYTGWGRLSRKLINGIRDKQSGKTILDF
LKSDGFANRNFMQLIHDDSLTFKEDIQKAQVSGQGDSLHEHIANLAGSPAIKKGILQTVKVV
DELVKVMGRHKPENIVIEMARENQTTQKGQKNSRERMKRIEEGIKELGSQILKEHPVENTQL
QNEKLYLYYLQNGRDMYVDQELDINRLSDYDVDHIVPQSFLKDDSIDNKVLTRSDKNRGKSD
NVPSEEVVKKMKNYWRQLLNAKLITQRKFDNLTKAERGGLSELDKAGFIKRQLVETRQITKH
VAQILDSRMNTKYDENDKLIREVKVITLKSKLVSDFRKDFQFYKVREINNYHHAHDAYLNAV
VGTALIKKYPKLESEFVYGDYKVYDVRKMIAKSEQEIGKATAKYFFYSNIMNFFKTEITLAN
GEIRKRPLIETNGETGEIVWDKGRDFATVRKVLSMPQVNIVKKTEVQTGGFSKESILPKRNS
DKLIARKKDWDPKKYGGFDSPTVAYSVLVVAKVEKGKSKKLKSVKELLGITIMERSSFEKNP
IDFLEAKGYKEVKKDLIIKLPKYSLFELENGRKRMLASAGELQKGNELALPSKYVNFLYLAS
HYEKLKGSPEDNEQKQLFVEQHKHYLDEIIEQISEFSKRVILADANLDKVLSAYNKHRDKPI
REQAENIIHLFTLTNLGAPAAFKYFDTTIDRKRYTSTKEVLDATLIHQSITGLYETRIDLSQ
LGGD

[0357] The amino acid sequence of an exemplary PAM-binding SpCas9n is as follows:

MDKKYSIGLAIGTNSVGWAVITDEYKVPSKKFKVLGNTDRHSIKKNLIGALLFDSGETAEAT
RLKRTARRRYTRRKNRICYLQEIFSNEMAKVDDSFFHRLEESFLVEEDKKHERHPIFGNIVD
EVAYHEKYPTIYHLRKKLVDSTDKADLRLIYLALAHMIKFRGHFLIEGDLNPDNSDVDKLFI
QLVQTYNQLFEENPINASGVDAKAILSARLSKSRRLENLIAQLPGEKKNGLFGNLIALSLGL
TPNFKSNFDLAEDAKLQLSKDTYDDDLDNLLAQIGDQYADLFLAAKNLSDAILLSDILRVNT
EITKAPLSASMIKRYDEHHQDLTLLKALVRQQLPEKYKEIFFDQSKNGYAGYIDGGASQEEF
YKFIKPILEKMDGTEELLVKLNREDLLRKQRTFDNGSIPHQIHLGELHAILRRQEDFYPFLK
DNREKIEKILTFRIPYYVGPLARGNSRFAWMTRKSEETITPWNFEEVVDKGASAQSFIERMT
NFDKNLPNEKVLPKHSLLYEYFTVYNELTKVKYVTEGMRKPAFLSGEQKKAIVDLLFKTNRK
VTVKQLKEDYFKKIECFDSVEISGVEDRFNASLGTYHDLLKIIKDKDFLDNEENEDILEDIV
LTLTLFEDREMIEERLKTYAHLFDDKVMKQLKRRRYTGWGRLSRKLINGIRDKQSGKTILDF
LKSDGFANRNFMQLIHDDSLTFKEDIQKAQVSGQGDSLHEHIANLAGSPAIKKGILQTVKVV
DELVKVMGRHKPENIVIEMARENQTTQKGQKNSRERMKRIEEGIKELGSQILKEHPVENTQL
QNEKLYLYYLQNGRDMYVDQELDINRLSDYDVDHIVPQSFLKDDSIDNKVLTRSDKNRGKSD
NVPSEEVVKKMKNYWRQLLNAKLITQRKFDNLTKAERGGLSELDKAGFIKRQLVETRQITKH
VAQILDSRMNTKYDENDKLIREVKVITLKSKLVSDFRKDFQFYKVREINNYHHAHDAYLNAV
VGTALIKKYPKLESEFVYGDYKVYDVRKMIAKSEQEIGKATAKYFFYSNIMNFFKTEITLAN
GEIRKRPLIETNGETGEIVWDKGRDFATVRKVLSMPQVNIVKKTEVQTGGFSKESILPKRNS
DKLIARKKDWDPKKYGGFDSPTVAYSVLVVAKVEKGKSKKLKSVKELLGITIMERSSFEKNP
IDFLEAKGYKEVKKDLIIKLPKYSLFELENGRKRMLASAGELQKGNELALPSKYVNFLYLAS
HYEKLKGSPEDNEQKQLFVEQHKHYLDEIIEQISEFSKRVILADANLDKVLSAYNKHRDKPI
REQAENIIHLFTLTNLGAPAAFKYFDTTIDRKRYTSTKEVLDATLIHQSITGLYETRIDLSQ
LGGD

[0358] The amino acid sequence of an exemplary PAM-binding SpEQR Cas9 is as follows:

MDKKYSIGLAIGTNSVGWAVITDEYKVPSKKFKVLGNTDRHSIKKNLIGALLFDSGETAEAT
RLKRTARRRYTRRKNRICYLQEIFSNEMAKVDDSFFHRLEESVLVEEDKKHERHPIFGNIVD
EVAYHEKYPTIYHLRKKLVDSTDKADLRLIYLALAHMIKFRGHFLIEGDLNPDNSDVDKLFI
QLVQTYNQLFEENPINASGVDAKAILSARLSKSRRLENLIAQLPGEKKNGLFGNLIALSLGL
TPNFKSNFDLAEDAKLQLSKDTYDDDLDNLLAQIGDQYADLFLAAKNLSDAILLSDILRVNT
EITKAPLSASMIKRYDEHHQDLTLLKALVRQQLPEKYKEIFFDQSKNGYAGYIDGGASQEEF
YKFIKPILEKMDGTEELLVKLNREDLLRKQRTFDNGSIPHQIHLGELHAILRRQEDFYPFLK
DNREKIEKILTFRIPYYVGPLARGNSRFAWMTRKSEETITPWNFEEVVDKGASAQSFIERMT
NFDKNLPNEKVLPKHSLLYEYFTVYNELTKVKYVTEGMRKPAFLSGEQKKAIVDLLFKTNRK
VTVKQLKEDYFKKIECFDSVEISGVEDRFNASLGTYHDLLKIIKDKDFLDNEENEDILEDIV
LTLTLFEDREMIEERLKTYAHLFDDKVMKQLKRRRYTGWGRLSRKLINGIRDKQSGKTILDF
LKSDGFANRNFMQLIHDDSLTFKEDIQKAQVSGQGDSLHEHIANLAGSPAIKKGILQTVKVV
DELVKVMGRHKPENIVIEMARENQTTQKGQKNSRERMKRIEEGIKELGSQILKEHPVENTQL
QNEKLYLYYLQNGRDMYVDQELDINRLSDYDVDHIVPQSFLKDDSIDNKVLTRSDKNRGKSD
NVPSEEVVKKMKNYWRQLLNAKLITQRKFDNLTKAERGGLSELDKAGFIKRQLVETRQITKH
VAQILDSRMNTKYDENDKLIREVKVITLKSKLVSDFRKDFQFYKVREINNYHHAHDAYLNAV
VGTALIKKYPKLESEFVYGDYKVYDVRKMIAKSEQEIGKATAKYFFYSNIMNFFKTEITLAN
GEIRKRPLIETNGETGEIVWDKGRDFATVRKVLSMPQVNIVKKTEVQTGGFSKESILPKRNS
DKLIARKKDWDPKKYGGFESPTVAYSVLVVAKVEKGKSKKLKSVKELLGITIMERSSFEKNP
IDFLEAKGYKEVKKDLIIKLPKYSLFELENGRKRMLASAGELQKGNELALPSKYVNFLYLAS
HYEKLKGSPEDNEQKQLFVEQHKHYLDEIIEQISEFSKRVILADANLDKVLSAYNKHRDKPI
REQAENIIHLFTLTNLGAPAAFKYFDTTIDRKQYRSTKEVLDATLIHQSITGLYETRIDLSQ
LGGD

[0359] In the above sequence, residues E1134, Q1334, and R1336, which can be mutated from D1134, R1335, and T1336 to yield a SpEQR Cas9, are underlined and in bold.

[0360] The amino acid sequence of an exemplary PAM-binding SpVQR Cas9 is as follows:

MDKKYSIGLAIGTNSVGWAVITDEYKVPSKKFKVLGNTDRHSIKKNLIGALLFDSGETAEAT
RLKRTARRRYTRRKNRICYLQEIFSNEMAKVDDSFFHRLEESFLVEEDKKHERHPIFGNIVD
EVAYHEKYPTIYHLRKKLVDSTDKADLRLIYLALAHMIKFRGHFLIEGDLNPDNSDVDKLFI
QLVQTYNQLFEENPINASGVDAKAILSARLSKSRRLENLIAQLPGEKKNGLFGNLIALSLGL
TPNFKSNFDLAEDAKLQLSKDTYDDDLDNLLAQIGDQYADLFLAAKNLSDAILLSDILRVNT
EITKAPLSASMIKRYDEHHQDLTLLKALVRQQLPEKYKEIFFDQSKNGYAGYIDGGASQEEF
YKFIKPILEKMDGTEELLVKLNREDLLRKQRTFDNGSIPHQIHLGELHAILRRQEDFYPFLK
DNREKIEKILTFRIPYYVGPLARGNSRFAWMTRKSEETITPWNFEEVVDKGASAQSFIERMT
NFDKNLPNEKVLPKHSLLYEYFTVYNELTKVKYVTEGMRKPAFLSGEQKKAIVDLLFKTNRK
VTVKQLKEDYFKKIECFDSVEISGVEDRFNASLGTYHDLLKIIKDKDFLDNEENEDILEDIV
LTLTLFEDREMIEERLKTYAHLFDDKVMKQLKRRRYTGWGRLSRKLINGIRDKQSGKTILDF
LKSDGFANRNFMQLIHDDSLTFKEDIQKAQVSGQGDSLHEHIANLAGSPAIKKGILQTVKVV
DELVKVMGRHKPENIVIEMARENQTTQKGQKNSRERMKRIEEGIKELGSQILKEHPVENTQL
QNEKLYLYYLQNGRDMYVDQELDINRLSDYDVDHIVPQSFLKDDSIDNKVLTRSDKNRGKSD
NVPSEEVVKKMKNYWRQLLNAKLITQRKFDNLTKAERGGLSELDKAGFIKRQLVETRQITKH
VAQILDSRMNTKYDENDKLIREVKVITLKSKLVSDFRKDFQFYKVREINNYHHAHDAYLNAV
VGTALIKKYPKLESEFVYGDYKVYDVRKMIAKSEQEIGKATAKYFFYSNIMNFFKTEITLAN
GEIRKRPLIETNGETGEIVWDKGRDFATVRKVLSMPQVNIVKKTEVQTGGFSKESILPKRNS
DKLIARKKDWDPKKYGGFVSPTVAYSVLVVAKVEKGKSKKLKSVKELLGITIMERSSFEKNP
IDFLEAKGYKEVKKDLIIKLPKYSLFELENGRKRMLASAGELQKGNELALPSKYVNFLYLAS
HYEKLKGSPEDNEQKQLFVEQHKHYLDEIIEQISEFSKRVILADANLDKVLSAYNKHRDKPI
REQAENIIHLFTLTNLGAPAAFKYFDTTIDRKQYRSTKEVLDATLIHQSITGLYETRIDLSQ
LGGD

[0361] In the above sequence, residues V1134, Q1334, and R1336, which can be mutated from D1134, R1335, and T1336 to yield a SpVQR Cas9, are underlined and in bold.

[0362] The amino acid sequence of an exemnlary PAM-binding SpVRFR Cas9 is as follows:

MDKKYSIGLAIGTNSVGWAVITDEYKVPSKKFKVLGNTDRHSIKKNLIGALLFDSGETAEAT
RLKRTARRRYTRRKNRICYLQEIFSNEMAKVDDSFFHRLEESFLVEEDKKHERHPIFGNIVD
EVAYHEKYPTIYHLRKKLVDSTDKADLRLIYLALAHMIKFRGHFLIEGDLNPDNSDVDKLFI
QLVQTYNQLFEENPINASGVDAKAILSARLSKSRRLENLIAQLPGEKKNGLFGNLIALSLGL
TPNFKSNFDLAEDAKLQLSKDTYDDDLDNLLAQIGDQYADLFLAAKNLSDAILLSDILRVNT
EITKAPLSASMIKRYDEHHQDLTLLKALVRQQLPEKYKEIFFDQSKNGYAGYIDGGASQEEF
YKFIKPILEKMDGTEELLVKLNREDLLRKQRTFDNGSIPHQIHLGELHAILRRQEDFYPFLK
DNREKIEKILTFRIPYYVGPLARGNSRFAWMTRKSEETITPWNFEEVVDKGASAQSFIERMT
NFDKNLPNEKVLPKHSLLYEYFTVYNELTKVKYVTEGMRKPAFLSGEQKKAIVDLLFKTNRK
VTVKQLKEDYFKKIECFDSVEISGVEDRFNASLGTYHDLLKIIKDKDFLDNEENEDILEDIV
LTLTLFEDREMIEERLKTYAHLFDDKVMKQLKRRRYTGWGRLSRKLINGIRDKQSGKTILDF
LKSDGFANRNFMQLIHDDSLTFKEDIQKAQVSGQGDSLHEHIANLAGSPAIKKGILQTVKVV
DELVKVMGRHKPENIVIEMARENQTTQKGQKNSRERMKRIEEGIKELGSQILKEHPVENTQL
QNEKLYLYYLQNGRDMYVDQELDINRLSDYDVDHIVPQSFLKDDSIDNKVLTRSDKNRGKSD
NVPSEEVVKKMKNYWRQLLNAKLITQRKFDNLTKAERGGLSELDKAGFIKRQLVETRQITKH
VAQILDSRMNTKYDENDKLIREVKVITLKSKLVSDFRKDFQFYKVREINNYHHAHDAYLNAV
VGTALIKKYPKLESEFVYGDYKVYDVRKMIAKSEQEIGKATAKYFFYSNIMNFFKTEITLAN
GEIRKRPLIETNGETGEIVWDKGRDFATVRKVLSMPQVNIVKKTEVQTGGFSKESILPKRNS
DKLIARKKDWDPKKYGGFVSPTVAYSVLVVAKVEKGKSKKLKSVKELLGITIMERSSFEKNP
IDFLEAKGYKEVKKDLIIKLPKYSLFELENGRKRMLASARELQKGNELALPSKYVNFLYLAS
HYEKLKGSPEDNEQKQLFVEQHKHYLDEIIEQISEFSKRVILADANLDKVLSAYNKHRDKPI
REQAENIIHLFTLTNLGAPAAFKYFDTTIDRKEYRSTKEVLDATLIHQSITGLYETRIDLSQ
LGGD.

[0363] In the above sequence, residues V1134, R1217, Q1334, and R1336, which can be mutated from D1134, G1217, R1335, and T1336 to yield a SpVRER Cas9, are underlined and in bold.

[0364] In some embodiments, engineered SpCas9 variants are capable of recognizing protospacer adjacent motif (PAM) sequences flanked by a 3′ H (non-G PAM) (see Tables 1A-1D; FIG. 24). In some embodiments, the SpCas9 variants recognize NRNH PAMs (where R is A or G and H is A, C or T). In some embodiments, the non-G PAM is NRRH, NRTH, or NRCH (see e.g., Miller, S.M., et al. Continuous evolution of SpCas9 variants compatible with non-G PAMs, Nat. Biotechnol. (2020), the contents of which is incorporated herein by reference in its entirety).

[0365] In some embodiments, the Cas9 domain is a recombinant Cas9 domain. In some embodiments, the recombinant Cas9 domain is a SpyMacCas9 domain. In some embodiments, the SpyMacCas9 domain is a nuclease active SpyMacCas9, a nuclease inactive SpyMacCas9 (SpyMacCas9d), or a SpyMacCas9 nickase (SpyMacCas9n). In some embodiments, the SaCas9 domain, the SaCas9d domain, or the SaCas9n domain can bind to a nucleic acid sequence having a non-canonical PAM. In some embodiments, the SpyMacCas9 domain, the SpCas9d domain, or the SpCas9n domain can bind to a nucleic acid sequence having a NAA PAM sequence.

[0366] The sequence of an exemplary Cas9 A homolog of Spy Cas9 in Streptococcus macacae with native 5′-NAAN-3′ PAM specificity is known in the art and described, for example, by Jakimo et al., (www.biorxiv.org/content/biorxiv/early/2018/09/27/429654.full.pdf), and is provided below.

SpyMacCas9
MDKKYSIGLDIGTNSVGWAVITDDYKVPSKKFKVLGNTDRHSIKKNLIGALLFGSGETAE
ATRLKRTARRRYTRRKNRICYLQEIFSNEMAKVDDSFFHRLEESFLVEEDKKHERHPIFG
NIVDEVAYHEKYPTIYHLRKKLADSTDKADLRLIYLALAHMIKFRGHFLIEGDLNPDNSD
VDKLFIQLVQIYNQLFEENPINASRVDAKAILSARLSKSRRLENLIAQLPGEKRNGLFGN
LIALSLGLTPNFKSNFDLAEDAKLQLSKDTYDDDLDNLLAQIGDQYADLFLAAKNLSDAI
LLSDILRVNSEITKAPLSASMIKRYDEHHQDLTLLKALVRQQLPEKYKEIFFDQSKNGYA
GYIDGGASQEEFYKFIKPILEKMDGTEELLVKLNREDLLRKQRTFDNGSIPHQIHLGELH
AILRRQEDFYPFLKDNREKIEKILTFRIPYYVGPLARGNSRFAWMTRKSEETITPWNFEE
VVDKGASAQSFIERMTNFDKNLPNEKVLPKHSLLYEYFTVYNELTKVKYVTEGMRKPAFL
SGEQKKAIVDLLFKTNRKVTVKQLKEDYFKKIECFDSVEISGVEDRFNASLGAYHDLLKI
IKDKDFLDNEENEDILEDIVLTLTLFEDRGMIEERLKTYAHLFDDKVMKQLKRRRYTGWG
RLSRKLINGIRDKQSGKTILDFLKSDGFANRNFMQLIHDDSLTFKEDIQKAQVSGQGHSL
HEQIANLAGSPAIKKGILQTVKIVDELVKVMGHKPENIVIEMARENQTTQKGQKNSRERM
KRIEEGIKELGSQILKEHPVENTQLQNEKLYLYYLQNGRDMYVDQELDINRLSDYDVDHI
VPQSFIKDDSIDNKVLTRSDKNRGKSDNVPSEEVVKKMKNYWRQLLNAKLITQRKFDNLT
KAERGGLSELDKAGFIKRQLVETRQITKHVAQILDSRMNTKYDENDKLIREVKVITLKSK
LVSDFRKDFQFYKVREINNYHHAHDAYLNAVVGTALIKKYPKLESEFVYGDYKVYDVRKM
IAKSEQEIGKATAKYFFYSNIMNFFKTEITLANGEIRKRPLIETNGETGEIVWDKGRDFA
TVRKVLSMPQVNIVKKTEIQTVGQNGGLFDDNPKSPLEVTPSKLVPLKKELNPKKYGGYQ
KPTTAYPVLLITDTKQLIP1SVMNKKQFEQNPVKFLRDRGYQQVGKNDFIKLPKYTLVDI
GDGIKRLWASSKEIHKGNQLVVSKKSQILLYHAHHLDSDLSNDYLQNHNQQFDVLFNEII
SFSKKCKLGKEHIQKIENVYSNKKNSASIEELAESFIKLLGFTQLGATSPFNFLGVKLNQ
KQYKGKKDYILPCTEGTLIRQSITGLYETRVDLSKIGED.

[0367] In some embodiments, a variant Cas9 protein harbors, H840A, P475A, W476A, N477A, D1125A, W1126A, and D1218A mutations such that the polypeptide has a reduced ability to cleave a target DNA or RNA. Such a Cas9 protein has a reduced ability to cleave a target DNA (e.g., a single stranded target DNA) but retains the ability to bind a target DNA (e.g., a single stranded target DNA). As another non-limiting example, in some embodiments, the variant Cas9 protein harbors D10A, H840A, P475A, W476A, N477A, D1125A, W1126A, and D1218A mutations such that the polypeptide has a reduced ability to cleave a target DNA. Such a Cas9 protein has a reduced ability to cleave a target DNA (e.g., a single stranded target DNA) but retains the ability to bind a target DNA (e.g., a single stranded target DNA). In some embodiments, when a variant Cas9 protein harbors W476A and W1126A mutations or when the variant Cas9 protein harbors P475A, W476A, N477A, D1125A, W1126A, and D1218A mutations, the variant Cas9 protein does not bind efficiently to a PAM sequence. Thus, in some such cases, when such a variant Cas9 protein is used in a method of binding, the method does not require a PAM sequence. In other words, in some embodiments, when such a variant Cas9 protein is used in a method of binding, the method can include a guide RNA, but the method can be performed in the absence of a PAM sequence (and the specificity of binding is therefore provided by the targeting segment of the guide RNA). Other residues can be mutated to achieve the above effects (i.e., inactivate one or the other nuclease portions). As non-limiting examples, residues D10, G12, G17, E762, H840, N854, N863, H982, H983, A984, D986, and/or A987 can be altered (i.e., substituted). Also, mutations other than alanine substitutions are suitable.

[0368] In some embodiments, a CRISPR protein-derived domain of a base editor can comprise all or a portion of a Cas9 protein with a canonical PAM sequence (NGG). In other embodiments, a Cas9-derived domain of a base editor can employ a non-canonical PAM sequence. Such sequences have been described in the art and would be apparent to the skilled artisan. For example, Cas9 domains that bind non-canonical PAM sequences have been described in Kleinstiver, B. P., et al., “Engineered CRISPR-Cas9 nucleases with altered PAM specificities” Nature 523, 481-485 (2015); and Kleinstiver, B. P., et al., “Broadening the targeting range of Staphylococcus aureus CRISPR-Cas9 by modifying PAM recognition” Nature Biotechnology 33, 1293-1298 (2015); the entire contents of each are hereby incorporated by reference.

Cas9 Domains with Reduced PAM Exclusivity

[0369] Typically, Cas9 proteins, such as Cas9 from S. pyogenes (spCas9), require a canonical NGG PAM sequence to bind a particular nucleic acid region, where the “N” in “NGG” is adenosine (A), thymidine (T), or cytosine (C), and the G is guanosine. This may limit the ability to edit desired bases within a genome. In some embodiments, the base editing fusion proteins provided herein may need to be placed at a precise location, for example a region comprising a target base that is upstream of the PAM. See e.g., Komor, A. C., et al., “Programmable editing of a target base in genomic DNA without double-stranded DNA cleavage” Nature 533, 420-424 (2016), the entire contents of which are hereby incorporated by reference. Accordingly, in some embodiments, any of the fusion proteins provided herein may contain a Cas9 domain that is capable of binding a nucleotide sequence that does not contain a canonical (e.g., NGG) PAM sequence. Cas9 domains that bind to non-canonical

[0370] PAM sequences have been described in the art and would be apparent to the skilled artisan. For example, Cas9 domains that bind non-canonical PAM sequences have been described in Kleinstiver, B. P., et al., “Engineered CRISPR-Cas9 nucleases with altered PAM specificities” Nature 523, 481-485 (2015); and Kleinstiver, B. P., et al., “Broadening the targeting range of Staphylococcus aureus CRISPR-Cas9 by modifying PAM recognition” Nature Biotechnology 33, 1293-1298 (2015); the entire contents of each are hereby incorporated by reference.

High fidelity Cas9 Domains

[0371] Some aspects of the disclosure provide high fidelity Cas9 domains. In some embodiments, high fidelity Cas9 domains are engineered Cas9 domains comprising one or more mutations that decrease electrostatic interactions between the Cas9 domain and a sugar-phosphate backbone of a DNA, as compared to a corresponding wild-type Cas9 domain. Without wishing to be bound by any particular theory, high fidelity Cas9 domains that have decreased electrostatic interactions with a sugar-phosphate backbone of DNA may have less off-target effects. In some embodiments, a Cas9 domain (e.g., a wild-type Cas9 domain) comprises one or more mutations that decreases the association between the Cas9 domain and a sugar-phosphate backbone of a DNA. In some embodiments, a Cas9 domain comprises one or more mutations that decreases the association between the Cas9 domain and a sugar-phosphate backbone of a DNA by at least 1%, at least 2%, at least 3%, at least 4%, at least 5%, at least 10%, at least 15%, at least 20%, at least 25%, at least 30%, at least 35%, at least 40%, at least 45%, at least 50%, at least 55%, at least 60%, at least 65%, or at least 70%.

[0372] In some embodiments, any of the Cas9 fusion proteins provided herein comprise one or more of a N497X, a R661X, a Q695X, and/or a Q926X mutation, or a corresponding mutation in any of the amino acid sequences provided herein, wherein X is any amino acid.

[0373] In some embodiments, any of the Cas9 fusion proteins provided herein comprise one or more of a N497A, a R661A, a Q695A, and/or a Q926A mutation, or a corresponding mutation in any of the amino acid sequences provided herein. In some embodiments, the Cas9 domain comprises a D10A mutation, or a corresponding mutation in any of the amino acid sequences provided herein. Cas9 domains with high fidelity are known in the art and would be apparent to the skilled artisan. For example, Cas9 domains with high fidelity have been described in Kleinstiver, B. P., et al. “High-fidelity CRISPR-Cas9 nucleases with no detectable genome-wide off-target effects.” Nature 529, 490-495 (2016); and Slaymaker, I. M., et al. “Rationally engineered Cas9 nucleases with improved specificity.” Science 351, 84-88 (2015); the entire contents of each are incorporated herein by reference.

[0374] In some embodiments, the modified Cas9 is a high fidelity Cas9 enzyme. In some embodiments, the high fidelity Cas9 enzyme is SpCas9(K855A), eSpCas9(1.1), SpCas9-HF1, or hyper accurate Cas9 variant (HypaCas9). The modified Cas9 eSpCas9(1.1) contains alanine substitutions that weaken the interactions between the HNH/RuvC groove and the non-target DNA strand, preventing strand separation and cutting at off-target sites. Similarly, SpCas9-HF1 lowers off-target editing through alanine substitutions that disrupt Cas9′s interactions with the DNA phosphate backbone. HypaCas9 contains mutations (SpCas9 N692A/M694A/Q695A/H698A) in the REC3 domain that increase Cas9 proofreading and target discrimination. All three high fidelity enzymes generate less off-target editing than wildtype Cas9.

[0375] An exemplary high fidelity Cas9 is provided below.

High Fidelity Cas9 domain mutations relative to Cas9 are shown in bold and underlined.

DKKYSIGLAIGTNSVGWAVITDEYKVPSKKFKVLGNTDRHSIKKNLIGALLFDSGETAEATR
LKRTARRRYTRRKNRICYLQEIFSNEMAKVDDSFFHRLEESFLVEEDKKHERHPIFGNIVDE
VAYHEKYPTIYHLRKKLVDSTDKADLRLIYLALAHMIKFRGHFLIEGDLNPDNSDVDKLFIQ
LVQTYNQLFEENPINASGVDAKAILSARLSKSRRLENLIAQLPGEKKNGLFGNLIALSLGLT
PNFKSNFDLAEDAKLQLSKDTYDDDLDNLLAQIGDQYADLFLAAKNLSDAILLSDILRVNTE
ITKAPLSASMIKRYDEHHQDLTLLKALVRQQLPEKYKEIFFDQSKNGYAGYIDGGASQEEFY
KFIKPILEKMDGTEELLVKLNREDLLRKQRTFDNGSIPHQIHLGELHAILRRQEDFYPFLKD
NREKIEKILTFRIPYYVGPLARGNSRFAWMTRKSEETITPWNFEEVVDKGASAQSFIERMTA
FDKNLPNEKVLPKHSLLYEYFTVYNELTKVKYVTEGMRKPAFLSGEQKKAIVDLLFKTNRKV
TVKQLKEDYFKKIECFDSVEISGVEDRFNASLGTYHDLLKIIKDKDFLDNEENEDILEDIVL
TLTLFEDREMIEERLKTYAHLFDDKVMKQLKRRRYTGWGALSRKLINGIRDKQSGKTILDFL
KSDGFANRNFMALIHDDSLTFKEDIQKAQVSGQGDSLHEHIANLAGSPAIKKGILQTVKVVD
ELVKVMGRHKPENIVIEMARENQTTQKGQKNSRERMKRIEEGIKELGSQILKEHPVENTQLQ
NEKLYLYYLQNGRDMYVDQELDINRLSDYDVDHIVPQSFLKDDSIDNKVLTRSDKNRGKSDN
VPSEEVVKKMKNYWRQLLNAKLITQRKFDNLTKAERGGLSELDKAGFIKRQLVETRAITKHV
AQILDSRMNTKYDENDKLIREVKVITLKSKLVSDFRKDFQFYKVREINNYHHAHDAYLNAVV
GTALIKKYPKLESEFVYGDYKVYDVRKMIAKSEQEIGKATAKYFFYSNIMNFFKTEITLANG
EIRKRPLIETNGETGEIVWDKGRDFATVRKVLSMPQVNIVKKTEVQTGGFSKESILPKRNSD
KLIARKKDWDPKKYGGFDSPTVAYSVLVVAKVEKGKSKKLKSVKELLGITIMERSSFEKNPI
DFLEAKGYKEVKKDLIIKLPKYSLFELENGRKRMLASAGELQKGNELALPSKYVNFLYLASH
YEKLKGSPEDNEQKQLFVEQHKHYLDEIIEQISEFSKRVILADANLDKVLSAYNKHRDKPIR
EQAENIIHLFTLTNLGAPAAFKYFDTTIDRKRYTSTKEVLDATLIHQSITGLYETRIDLSQL
GGD

### Fusion Proteins Comprising a Nuclear Localization Sequence (NLS)

[0376] In some embodiments, the fusion proteins provided herein further comprise one or more (e.g., 2, 3, 4, 5) nuclear targeting sequences, for example a nuclear localization sequence (NLS). In one embodiment, a bipartite NLS is used. In some embodiments, a NLS comprises an amino acid sequence that facilitates the importation of a protein, that comprises an NLS, into the cell nucleus (e.g., by nuclear transport). In some embodiments, any of the fusion proteins provided herein further comprise a nuclear localization sequence (NLS). In some embodiments, the NLS is fused to the N-terminus of the fusion protein. In some embodiments, the NLS is fused to the C-terminus of the fusion protein. In some embodiments, the NLS is fused to the N-terminus of the Cas9 domain. In some embodiments, the NLS is fused to the C-terminus of an nCas9 domain or a dCas9 domain. In some embodiments, the NLS is fused to the N-terminus of the deaminase. In some embodiments, the NLS is fused to the C-terminus of the deaminase. In some embodiments, the NLS is fused to the fusion protein via one or more linkers. In some embodiments, the NLS is fused to the fusion protein without a linker. In some embodiments, the NLS comprises an amino acid sequence of any one of the NLS sequences provided or referenced herein. Additional nuclear localization sequences are known in the art and would be apparent to the skilled artisan. For example, NLS sequences are described in Plank et al., PCT/EP2000/011690, the contents of which are incorporated herein by reference for their disclosure of exemplary nuclear localization sequences. In some embodiments, an NLS comprises an amino acid sequence selected from:

PKKKRKVEGADKRTADGSEFESPKKKRKV,
KRTADGSEFESPKKKRKV,
KRPAATKKAGQAKKKK,
KKTELQTTNAENKTKKL,
KRGINDRNFWRGENGRKTR,
RKSGKIAAIVVKRPRKPKKKRKV,
or
MDSLLMNRRKFLYQFKNVRWAKGRRETYLC.

In some embodiments, the NLS is present in a linker or the NLS is flanked by linkers, for example, the linkers described herein. In some embodiments, the N-terminus or C-terminus NLS is a bipartite NLS. A bipartite NLS comprises two basic amino acid clusters, which are separated by a relatively short spacer sequence (hence bipartite-2 parts, while monopartite NLSs are not). The NLS of nucleoplasmin, KR[PAATKKAGQA]KKKK, is the prototype of the ubiquitous bipartite signal: two clusters of basic amino acids, separated by a spacer of about 10 amino acids. The sequence of an exemplary bipartite NLS follows:

PKKKRKVEGADKRTADGSEFESPKKKRKV

[0377] In some embodiments, the fusion proteins comprising an adenosine deaminase, a napDNAbp (e.g., a Cas9 domain), and an NLS do not comprise a linker sequence. In some embodiments, linker sequences between one or more of the domains or proteins (e.g., adenosine deaminase, Cas9 domain or NLS) are present. In some embodiments, the general architecture of exemplary Cas9 fusion proteins with an adenosine deaminase and a Cas9 domain comprises any one of the following structures, where NLS is a nuclear localization sequence (e.g., any NLS provided herein), NH2 is the N-terminus of the fusion protein, and COOH is the C-terminus of the fusion protein:
[0378] NH₂-NLS-[adenosine deaminase]-[Cas9 domain]-COOH;
[0379] NH₂-NLS [Cas9 domain]-[ adenosine deaminase]-COOH;
[0380] NH₂-[ adenosine deaminase]-[Cas9 domain]-NLS-COOH; or
[0381] NH₂-[Cas9 domain]-[ adenosine deaminase]-NLS-COOH.

[0382] It should be appreciated that the fusion proteins of the present disclosure may comprise one or more additional features. For example, in some embodiments, the fusion protein may comprise inhibitors, cytoplasmic localization sequences, export sequences, such as nuclear export sequences, or other localization sequences, as well as sequence tags that are useful for solubilization, purification, or detection of the fusion proteins. Suitable protein tags provided herein include, but are not limited to, biotin carboxylase carrier protein (BCCP) tags, myc-tags, calmodulin-tags, FLAG-tags, hemagglutinin (HA)-tags, polyhistidine tags, also referred to as histidine tags or His-tags, maltose binding protein (MBP)-tags, nus-tags, glutathione-S-transferase (GST)-tags, green fluorescent protein (GFP)-tags, thioredoxin-tags, S-tags, Softags (e.g., Softag 1, Softag 3), strep-tags , biotin ligase tags, FlAsH tags, V5 tags, and SBP-tags. Additional suitable sequences will be apparent to those of skill in the art. In some embodiments, the fusion protein comprises one or more His tags.

[0383] A vector that encodes a CRISPR enzyme comprising one or more nuclear localization sequences (NLSs) can be used. For example, there can be or be about 1, 2, 3, 4, 5, 6, 7, 8, 9, 10 NLSs used. A CRISPR enzyme can comprise the NLSs at or near the ammo-terminus, about or more than about 1, 2, 3, 4, 5, 6, 7, 8, 9, 10 NLSs at or near the carboxy-terminus, or any combination of these (e.g., one or more NLS at the ammo-terminus and one or more NLS at the carboxy terminus). When more than one NLS is present, each can be selected independently of others, such that a single NLS can be present in more than one copy and/or in combination with one or more other NLSs present in one or more copies.

[0384] CRISPR enzymes used in the methods can comprise about 6 NLSs. An NLS is considered near the N- or C-terminus when the nearest amino acid to the NLS is within about 50 amino acids along a polypeptide chain from the N- or C-terminus, e.g., within 1, 2, 3, 4, 5, 10, 15, 20, 25, 30, 40, or 50 amino acids.

### Nucleobase Editing Domain

[0385] Described herein are base editors comprising a fusion protein that includes a polynucleotide programmable nucleotide binding domain and a nucleobase editing domain (e.g., a deaminase domain). The base editor can be programmed to edit one or more bases in a target polynucleotide sequence by interacting with a guide polynucleotide capable of recognizing the target sequence. Once the target sequence has been recognized, the base editor is anchored on the polynucleotide where editing is to occur and the deaminase domain components of the base editor can then edit a target base.

[0386] In some embodiments, the nucleobase editing domain includes a deaminase domain. As particularly described herein, the deaminase domain includes an adenosine deaminase. In some embodiments, the terms “adenine deaminase” and “adenosine deaminase” can be used interchangeably. Details of nucleobase editing proteins are described in International PCT Application Nos. PCT/2017/045381 (WO2018/027078) and PCT/US2016/058344 (WO2017/070632), each of which is incorporated herein by reference for its entirety. Also see Komor, A. C., et al., “Programmable editing of a target base in genomic DNA without double-stranded DNA cleavage” Nature 533, 420-424 (2016); Gaudelli, N. M., et al., “Programmable base editing of A•T to G•C in genomic DNA without DNA cleavage” Nature 551, 464-471 (2017); and Komor, A. C., et al., “Improved base excision repair inhibition and bacteriophage Mu Gam protein yields C:G-to-T:A base editors with higher efficiency and product purity” Science Advances 3:eaao4774 (2017), the entire contents of which are hereby incorporated by reference.

### A to G Editing

[0387] In some embodiments, a base editor described herein can comprise a deaminase domain which includes an adenosine deaminase. Such an adenosine deaminase domain of a base editor can facilitate the editing of an adenine (A) nucleobase to a guanine (G) nucleobase by deaminating the A to form inosine (I), which exhibits base pairing properties of G. Adenosine deaminase is capable of deaminating (i.e., removing an amine group) adenine of a deoxyadenosine residue in deoxyribonucleic acid (DNA).

[0388] In some embodiments, the nucleobase editors provided herein can be made by fusing together one or more protein domains, thereby generating a fusion protein. In certain embodiments, the fusion proteins provided herein comprise one or more features that improve the base editing activity (e.g., efficiency, selectivity, and specificity) of the fusion proteins. For example, the fusion proteins provided herein can comprise a Cas9 domain that has reduced nuclease activity. In some embodiments, the fusion proteins provided herein can have a Cas9 domain that does not have nuclease activity (dCas9), or a Cas9 domain that cuts one strand of a duplexed DNA molecule, referred to as a Cas9 nickase (nCas9). Without wishing to be bound by any particular theory, the presence of the catalytic residue (e.g., H840) maintains the activity of the Cas9 to cleave the non-edited (e.g., non-deaminated) strand containing a T opposite the targeted A. Mutation of the catalytic residue (e.g., D10 to A10) of Cas9 prevents cleavage of the edited strand containing the targeted A residue. Such Cas9 variants are able to generate a single-strand DNA break (nick) at a specific location based on the gRNA-defined target sequence, leading to repair of the non-edited strand, ultimately resulting in a T to C change on the non-edited strand. In some embodiments, an A-to-G base editor further comprises an inhibitor of inosine base excision repair, for example, a uracil glycosylase inhibitor (UGI) domain or a catalytically inactive inosine specific nuclease. Without wishing to be bound by any particular theory, the UGI domain or catalytically inactive inosine specific nuclease can inhibit or prevent base excision repair of a deaminated adenosine residue (e.g., inosine), which can improve the activity or efficiency of the base editor.

[0389] A base editor comprising an adenosine deaminase can act on any polynucleotide, including DNA, RNA and DNA-RNA hybrids. In certain embodiments, a base editor comprising an adenosine deaminase can deaminate a target A of a polynucleotide comprising RNA. For example, the base editor can comprise an adenosine deaminase domain capable of deaminating a target A of an RNA polynucleotide and/or a DNA-RNA hybrid polynucleotide. In an embodiment, an adenosine deaminase incorporated into a base editor comprises all or a portion of adenosine deaminase acting on RNA (ADAR, e.g., ADAR1 or ADAR2). In another embodiment, an adenosine deaminase incorporated into a base editor comprises all or a portion of adenosine deaminase acting on tRNA (ADAT). A base editor comprising an adenosine deaminase domain can also be capable of deaminating an A nucleobase of a DNA polynucleotide. In an embodiment an adenosine deaminase domain of a base editor comprises all or a portion of an ADAT comprising one or more mutations which permit the ADAT to deaminate a target A in DNA. For example, the base editor can comprise all or a portion of an ADAT from Escherichia coli (EcTadA) comprising one or more of the following mutations: D108N, A106V, D147Y, E155V, L84F, H123Y, I156F, or a corresponding mutation in another adenosine deaminase.

[0390] The adenosine deaminase can be derived from any suitable organism (e.g., E. coli). In some embodiments, the adenosine deaminase is from a prokaryote. In some embodiments, the adenosine deaminase is from a bacterium. In some embodiments, the adenosine deaminase is from Escherichia coli, Staphylococcus aureus, Salmonella typhi, Shewanella putrefaciens, Haemophilus influenzae, Caulobacter crescentus, or Bacillus subtilis. In some embodiments, the adenosine deaminase is from E. coli. In some embodiments, the adenine deaminase is a naturally-occurring adenosine deaminase that includes one or more mutations corresponding to any of the mutations provided herein (e.g., mutations in ecTadA). The corresponding residue in any homologous protein can be identified by e.g., sequence alignment and determination of homologous residues. The mutations in any naturally-occurring adenosine deaminase (e.g., having homology to ecTadA) that corresponds to any of the mutations described herein (e.g., any of the mutations identified in ecTadA) can be generated accordingly.

### Adenosine Deaminases

[0391] In some embodiments, a base editor described herein can comprise a deaminase domain which includes an adenosine deaminase. Such an adenosine deaminase domain of a base editor can facilitate the editing of an adenine (A) nucleobase to a guanine (G) nucleobase by deaminating the A to form inosine (I), which exhibits base pairing properties of G. Adenosine deaminase is capable of deaminating (i.e., removing an amine group) adenine of a deoxyadenosine residue in deoxyribonucleic acid (DNA).

[0392] In some embodiments, the adenosine deaminases provided herein are capable of deaminating adenine. In some embodiments, the adenosine deaminases provided herein are capable of deaminating adenine in a deoxyadenosine residue of DNA. In some embodiments, the adenine deaminase is a naturally-occurring adenosine deaminase that includes one or more mutations corresponding to any of the mutations provided herein (e.g., mutations in ecTadA). One of skill in the art will be able to identify the corresponding residue in any homologous protein, e.g., by sequence alignment and determination of homologous residues. Accordingly, one of skill in the art would be able to generate mutations in any naturally-occurring adenosine deaminase (e.g., having homology to ecTadA) that corresponds to any of the mutations described herein, e.g., any of the mutations identified in ecTadA. In some embodiments, the adenosine deaminase is from a prokaryote. In some embodiments, the adenosine deaminase is from a bacterium. In some embodiments, the adenosine deaminase is from Escherichia coli, Staphylococcus aureus, Salmonella typhi, Shewanella putrefaciens, Haemophilus influenzae, Caulobacter crescentus, or Bacillus subtilis. In some embodiments, the adenosine deaminase is from E. coli.

[0393] The invention provides adenosine deaminase variants that have increased efficiency (>50-60%) and specificity. In particular, the adenosine deaminase variants described herein are more likely to edit a desired base within a polynucleotide, and are less likely to edit bases that are not intended to be altered (i.e., “bystanders”).

[0394] In particular embodiments, the TadA is any one of the TadA described in PCT/US2017/045381 (WO 2018/027078), which is incorporated herein by reference in its entirety.

[0395] In some embodiments, the nucleobase editors of the invention are adenosine deaminase variants comprising an alteration in the following sequence:

MSEVEFSHEYWMRHALTLAKRARDEREVPVGAVLVLNNRVIGEGWNRAI
GLHDPTAHAEIMALRQGGLVMQNYRLIDATLYVTFEPCVMCAGAMIHSR
IGRVVFGVRNAKTGAAGSLMDVLHYPGMNHRVEITEGILADECAALLCY
FFRMPRQVFNAQKKAQSSTD (also termed TadA*7.10).

[0396] In particular embodiments, the fusion proteins comprise a single (e.g., provided as a monomer) TadA*8 variant. In some embodiments, the TadA*8 is linked to a Cas9 nickase. In some embodiments, the fusion proteins of the invention comprise as a heterodimer of a wild-type TadA (TadA(wt)) linked to a TadA*8 variant. In other embodiments, the fusion proteins of the invention comprise as a heterodimer of a TadA*7.10 linked to a TadA*8 variant. In some embodiments, the base editor is ABE8 comprising a TadA*8 variant monomer. In some embodiments, the base editor is ABE8 comprising a heterodimer of a TadA*8 variant and a TadA(wt). In some embodiments, the base editor is ABE8 comprising a heterodimer of a TadA*8 variant and TadA*7.10. In some embodiments, the base editor is ABE8 comprising a heterodimer of a TadA*8 variant. In some embodiments, the TadA*8 variant is selected from Table 7. In some embodiments, the ABE8 is selected from Table 7. The relevant sequences follow:

Wild-type TadA (TadA(wt)) or “the TadA reference
sequence”
(SEQ ID NO: 2)
MSEVEFSHEYWMRHALTLAKRAWDEREVPVGAVLVHNNRVIGEGWNRPI
GRHDPTAHAEIMALRQGGLVMQNYRLIDATLYVTLEPCVMCAGAMIHSR
IGRVVFGARDAKTGAAGSLMDVLHHPGMNHRVEITEGILADECAALLSD
FFRMRRQEIKAQKKAQSSTD
TadA*7.10:
MSEVEFSHEYW MRHALTLAKR ARDEREVPVG AVLVLNNRVI
GEGWNRAIGL HDPTAHAEIM ALRQGGLVMQ NYRLIDATLY
VTFEPCVMCA GAMIHSRIGR VVFGVRNAKT GAAGSLMDVL
HYPGMNHRVE ITEGILADEC AALLCYFFRM PRQVFNAQKK
AQSSTD

[0397] In some embodiments, the adenosine deaminase comprises an amino acid sequence that is at least 60%, at least 65%, at least 70%, at least 75%, at least 80%, at least 85%, at least 90%, at least 95%, at least 96%, at least 97%, at least 98%, at least 99%, or at least 99.5% identical to any one of the amino acid sequences set forth in any of the adenosine deaminases provided herein. It should be appreciated that adenosine deaminases provided herein may include one or more mutations (e.g., any of the mutations provided herein). The disclosure provides any deaminase domains with a certain percent identity plus any of the mutations or combinations thereof described herein. In some embodiments, the adenosine deaminase comprises an amino acid sequence that has 1, 2, 3, 4, 5, 6, 7, 8, 9, 10, 11, 12, 13, 14, 15, 16, 17, 18, 19, 20, 21, 22, 21, 24, 25, 26, 27, 28, 29, 30, 31, 32, 33, 34, 35, 36, 37, 38, 39, 40, 41, 42, 43, 44, 45, 46, 47, 48, 49, 50, or more mutations compared to a reference sequence, or any of the adenosine deaminases provided herein. In some embodiments, the adenosine deaminase comprises an amino acid sequence that has at least 5, at least 10, at least 15, at least 20, at least 25, at least 30, at least 35, at least 40, at least 45, at least 50, at least 60, at least 70, at least 80, at least 90, at least 100, at least 110, at least 120, at least 130, at least 140, at least 150, at least 160, or at least 170 identical contiguous amino acid residues as compared to any one of the amino acid sequences known in the art or described herein.

[0398] In some embodiments the TadA deaminase is a full-length E. coli TadA deaminase. For example, in certain embodiments, the adenosine deaminase comprises the amino acid sequence:

MRRAFITGVFFLSEVEFSHEYWMRHALTLAKRAWDEREVPVGAVLVHNN
RVIGEGWNRPIGRHDPTAHAEIMALRQGGLVMQNYRLIDATLYVTLEPC
VMCAGAMIHSRIGRVVFGARDAKTGAAGSLMDVLHHPGMNHRVEITEGI
LADECAALLSDFFRMRRQEIKAQKKAQSSTD.

[0399] It should be appreciated, however, that additional adenosine deaminases useful in the present application would be apparent to the skilled artisan and are within the scope of this disclosure. For example, the adenosine deaminase may be a homolog of adenosine deaminase acting on tRNA (ADAT). Without limitation, the amino acid sequences of exemplary AD AT homologs include the following:

Staphylococcus aureus TadA:
MGSHMTNDIYFMTLAIEEAKKAAQLGEVPIGAIITKDDEVIARAHNLRET
LQQPTAHAEHIAIERAAKVLGSWRLEGCTLYVTLEPCVMCAGTIVMSRIP
RVVYGADDPKGGCSGSLMNLLQQSNFNHRAIVDKGVLKEACSTLLTTFFK
NLRANKKSTN
Bacillus subtilis TadA:
MTQDELYMKEAIKEAKKAEEKGEVPIGAVLVINGEIIARAHNLRETEQRS
IAHAEMLVIDEACKALGTWRLEGATLYVTLEPCPMCAGAVVLSRVEKVVF
GAFDPKGGCSGTLMNLLQEERFNHQAEVVSGVLEEECGGMLSAFFRELRK
KKKAARKNLSE
Salmonella typhimurium (S. typhimurium) TadA:
MPPAFITGVTSLSDVELDHEYWMRHALTLAKRAWDEREVPVGAVLVHNHR
VIGEGWNRPIGRHDPTAHAEIMALRQGGLVLQNYRLLDTTLYVTLEPCVM
CAGAMVHSRIGRVVFGARDAKTGAAGSLIDVLHHPGMNHRVEIIEGVLRD
ECATLLSDFFRMRRQEIKALKKADRAEGAGPAV
Shewanella putrefaciens (S. putrefaciens) TadA:
MDEYWMQVAMQMAEKAEAAGEVPVGAVLVKDGQQIATGYNLSISQHDPTA
HAEILCLRSAGKKLENYRLLDATLYITLEPCAMCAGAMVHSRIARVVYGA
RDEKTGAAGTVVNLLQHPAFNHQVEVTSGVLAEACSAQLSRFFKRRRDEK
KALKLAQRAQQGIE
Haemophilus influenzae F3031 (H. influenzae)
TadA:
MDAAKVRSEFDEKMMRYALELADKAEALGEIPVGAVLVDDARNIIGEGWN
LSIVQSDPTAHAEIIALRNGAKNIQNYRLLNSTLYVTLEPCTMCAGAILH
SRIKRLVFGASDYKTGAIGSRFHFFDDYKMNHTLEITSGVLAEECSQKLS
TFFQKRREEKKIEKALLKSLSDK
Caulobacter crescentus (C. crescentus) TadA:
MRTDESEDQDHRMMRLALDAARAAAEAGETPVGAVILDPSTGEVIATAGN
GPIAAHDPTAHAEIAAMRAAAAKLGNYRLTDLTLVVTLEPCAMCAGAISH
ARIGRVVFGADDPKGGAVVHGPKFFAQPTCHWRPEVTGGVLADESADLLR
GFFRARRKAKI
Geobacter sulfurreducens (G. sulfurreducens)
TadA:
MSSLKKTPIRDDAYWMGKAIREAAKAAARDEVPIGAVIVRDGAVIGRGHN
LREGSNDPSAHAEMIAIRQAARRSANWRLTGATLYVTLEPCLMCMGAIIL
ARLERVVFGCYDPKGGAAGSLYDLSADPRLNHQVRLSPGVCQEECGTMLS
DFFRDLRRRKKAKATPALFIDERKVPPEP
An embodiment of E. Coli TadA (ecTadA) includes
the following:
MSEVEFSHEYWMRHALTLAKRARDEREVPVGAVLVLNNRVIGEGWNRAIG
LHDPTAHAEIMALRQGGLVMQNYRLIDATLYVTFEPCVMCAGAMIHSRIG
RVVFGVRNAKTGAAGSLMDVLHYPGMNHRVEITEGILADECAALLCYFFR
MPRQVFNAQKKAQSSTD

[0400] In some embodiments, the adenosine deaminase is from a prokaryote. In some embodiments, the adenosine deaminase is from a bacterium. In some embodiments, the adenosine deaminase is from Escherichia coli, Staphylococcus aureus, Salmonella typhi, Shewanella putrefaciens, Haemophilus influenzae, Caulobacter crescentus, or Bacillus subtilis. In some embodiments, the adenosine deaminase is from E. coli.

[0401] In one embodiment, a fusion protein of the invention comprises a wild-type TadA linked to TadA7.10, which is linked to Cas9 nickase. In particular embodiments, the fusion proteins comprise a single TadA7.10 domain (e.g., provided as a monomer). In other embodiments, the ABE7.10 editor comprises TadA7.10 and TadA(wt), which are capable of forming heterodimers.

[0402] In some embodiments, the adenosine deaminase comprises an amino acid sequence that is at least 60%, at least 65%, at least 70%, at least 75%, at least 80%, at least 85%, at least 90%, at least 95%, at least 96%, at least 97%, at least 98%, at least 99%, or at least 99.5% identical to any one of the amino acid sequences set forth in any of the adenosine deaminases provided herein. It should be appreciated that adenosine deaminases provided herein may include one or more mutations (e.g., any of the mutations provided herein). The disclosure provides any deaminase domains with a certain percent identity plus any of the mutations or combinations thereof described herein. In some embodiments, the adenosine deaminase comprises an amino acid sequence that has 1, 2, 3, 4, 5, 6, 7, 8, 9, 10, 11, 12, 13, 14, 15, 16, 17, 18, 19, 20, 21, 22, 21, 24, 25, 26, 27, 28, 29, 30, 31, 32, 33, 34, 35, 36, 37, 38, 39, 40, 41, 42, 43, 44, 45, 46, 47, 48, 49, 50, or more mutations compared to a reference sequence, or any of the adenosine deaminases provided herein. In some embodiments, the adenosine deaminase comprises an amino acid sequence that has at least 5, at least 10, at least 15, at least 20, at least 25, at least 30, at least 35, at least 40, at least 45, at least 50, at least 60, at least 70, at least 80, at least 90, at least 100, at least 110, at least 120, at least 130, at least 140, at least 150, at least 160, or at least 170 identical contiguous amino acid residues as compared to any one of the amino acid sequences known in the art or described herein.

[0403] It should be appreciated that any of the mutations provided herein (e.g., based on the TadA reference amino acid sequence) may be introduced into other adenosine deaminases, such as E. coli TadA (ecTadA), S. aureus TadA (saTadA), or other adenosine deaminases (e.g., bacterial adenosine deaminases). It would be apparent to the skilled artisan how to identify sequences that are homologous to the mutated residues relative to the TadA reference amino acid sequence as provided herein. Thus, any of the mutations identified relative to the TadA reference sequence may be made in other adenosine deaminases (e.g., ecTada) that have homologous amino acid residues. It should also be appreciated that any of the mutations provided herein may be made individually or in any combination relative to the TadA reference sequence or another adenosine deaminase.

[0404] In some embodiments, the adenosine deaminase comprises a D108X mutation in the TadA reference sequence, or a corresponding mutation in another adenosine deaminase (e.g., ecTadA), where X indicates any amino acid other than the corresponding amino acid in the wild-type adenosine deaminase. In some embodiments, the adenosine deaminase comprises a D108G, D108N, D108V, D108A, or D108Y mutation, or a corresponding mutation in another adenosine deaminase.

[0405] In some embodiments, the adenosine deaminase comprises an A106X mutation in TadA reference sequence, or a corresponding mutation in another adenosine deaminase (e.g., ecTadA), where X indicates any amino acid other than the corresponding amino acid in the wild-type adenosine deaminase. In some embodiments, the adenosine deaminase comprises an A106V mutation in TadA reference sequence, or a corresponding mutation in another adenosine deaminase (e.g., wild-type TadA or ecTadA).

[0406] In some embodiments, the adenosine deaminase comprises a E155X mutation in TadA reference sequence, or a corresponding mutation in another adenosine deaminase (e.g., ecTadA), where the presence of X indicates any amino acid other than the corresponding amino acid in the wild-type adenosine deaminase. In some embodiments, the adenosine deaminase comprises a E155D, E155G, or E155V mutation in TadA reference sequence, or a corresponding mutation in another adenosine deaminase (e.g., ecTadA).

[0407] In some embodiments, the adenosine deaminase comprises a D147X mutation in TadA reference sequence, or a corresponding mutation in another adenosine deaminase (e.g., ecTadA), where the presence of X indicates any amino acid other than the corresponding amino acid in the wild-type adenosine deaminase. In some embodiments, the adenosine deaminase comprises a D147Y, mutation in TadA reference sequence, or a corresponding mutation in another adenosine deaminase (e.g., ecTadA).

[0408] In some embodiments, the adenosine deaminase comprises an A106X, E155X, or D147X, mutation in the TadA reference sequence, or a corresponding mutation in another adenosine deaminase (e.g., ecTadA), where X indicates any amino acid other than the corresponding amino acid in the wild-type adenosine deaminase. In some embodiments, the adenosine deaminase comprises an E155D, E155G, or E155V mutation. In some embodiments, the adenosine deaminase comprises a D147Y.

[0409] For example, an adenosine deaminase may contain a D108N, a A106V, a E155V, and/or a D147Y mutation relative to the TadA reference sequence, or a corresponding mutation in another adenosine deaminase (e.g., ecTadA). In some embodiments, an adenosine deaminase comprises the following group of mutations (groups of mutations are separated by a “; ”) in TadA reference sequence, or corresponding mutations in another adenosine deaminase (e.g., ecTadA): D108N and A106V; D108N and E155V; D108N and D147Y; A106V and E155V; A106V and D147Y; E155V and D147Y; D108N, A106V, and E155V; D108N, A106V, and D147Y; D108N, E155V, and D147Y; A106V, E155V, and D 147Y; and D108N, A106V, E155V, and D147Y. It should be appreciated, however, that any combination of corresponding mutations provided herein may be made in an adenosine deaminase (e.g., ecTadA).

[0410] In some embodiments, the adenosine deaminase comprises one or more of a H8X, T17X, L18X, W23X, L34X, W45X, R51X, A56X, E59X, E85X, M94X, I95X, V102X, F104X, A106X, R107X, D108X, K110X, M118X, N127X, A138X, F149X, M151X, R153X, Q154X, I156X, and/or K157X mutation in TadA reference sequence, or one or more corresponding mutations in another adenosine deaminase (e.g., ecTadA), where the presence of X indicates any amino acid other than the corresponding amino acid in the wild-type adenosine deaminase. In some embodiments, the adenosine deaminase comprises one or more of H8Y, T17S, L18E, W23L, L34S, W45L, R51H, A56E, or A56S, E59G, E85K, or E85G, M94L, I95L, V102A, F104L, A106V, R107C, or R107H, or R107P, D108G, or D108N, or D108V, or D108A, or D108Y, K110I, M118K, N127S, A138V, F149Y, M151V, R153C, Q154L, I156D, and/or K157R mutation relative to the TadA reference sequence, or one or more corresponding mutations relative to another adenosine deaminase (e.g., ecTadA).

[0411] In some embodiments, the adenosine deaminase comprises one or more of a H8X, D108X, and/or N127X mutation in TadA reference sequence, or one or more corresponding mutations in another adenosine deaminase (e.g., ecTadA), where X indicates the presence of any amino acid. In some embodiments, the adenosine deaminase comprises one or more of a H8Y, D108N, and/or N127S mutation relative to the TadA reference sequence, or one or more corresponding mutations relative to another adenosine deaminase (e.g., ecTadA).

[0412] In some embodiments, the adenosine deaminase comprises one or more of H8X, R26X, M61X, L68X, M70X, A106X, D108X, A109X, N127X, D147X, R152X, Q154X, E155X, K161X, Q163X, and/or T166X mutation relative to the TadA reference sequence, or one or more corresponding mutations relative to another adenosine deaminase (e.g., ecTadA), where X indicates the presence of any amino acid other than the corresponding amino acid in the wild-type adenosine deaminase. In some embodiments, the adenosine deaminase comprises one or more of H8Y, R26W, M611, L68Q, M70V, A106T, D108N, A109T, N127S, D147Y, R152C, Q154H or Q154R, E155G or E155V or E155D, K161Q, Q163H, and/or T166P mutation relative to the TadA reference sequence, or one or more corresponding mutations relative to another adenosine deaminase (e.g., ecTadA).

[0413] In some embodiments, the adenosine deaminase comprises one, two, three, four, five, or six mutations selected from the group consisting of H8X, D108X, N127X, D147X, R152X, and Q154X relative to the TadA reference sequence, or a corresponding mutation or mutations relative to another adenosine deaminase (e.g., ecTadA), where X indicates the presence of any amino acid other than the corresponding amino acid in the wild-type adenosine deaminase. In some embodiments, the adenosine deaminase comprises one, two, three, four, five, six, seven, or eight mutations selected from the group consisting of H8X, M61X, M70X, D108X, N127X, Q154X, E155X, and Q163X relative to the TadA reference sequence, or a corresponding mutation or mutations relative to another adenosine deaminase (e.g., ecTadA), where X indicates the presence of any amino acid other than the corresponding amino acid in the wild-type adenosine deaminase. In some embodiments, the adenosine deaminase comprises one, two, three, four, or five, mutations selected from the group consisting of H8X, D108X, N127X, E155X, and T166X relative to the TadA reference sequence, or a corresponding mutation or mutations relative to another adenosine deaminase (e.g., ecTadA), where X indicates the presence of any amino acid other than the corresponding amino acid in the wild-type adenosine deaminase.

[0414] In some embodiments, the adenosine deaminase comprises one, two, three, four, five, or six mutations selected from the group consisting of H8X, A106X, D108X, mutation or mutations relative to another adenosine deaminase, where X indicates the presence of any amino acid other than the corresponding amino acid in the wild-type adenosine deaminase. In some embodiments, the adenosine deaminase comprises one, two, three, four, five, six, seven, or eight mutations selected from the group consisting of H8X, R26X, L68X, D108X, N127X, D147X, and E155X, or a corresponding mutation or mutations relative to another adenosine deaminase, where X indicates the presence of any amino acid other than the corresponding amino acid in the wild-type adenosine deaminase. In some embodiments, the adenosine deaminase comprises one, two, three, four, or five, mutations selected from the group consisting of H8X, D108X, A109X, N127X, and E155X relative to the TadA reference sequence, or a corresponding mutation or mutations relative to another adenosine deaminase (e.g., ecTadA), where X indicates the presence of any amino acid other than the corresponding amino acid in the wild-type adenosine deaminase.

[0415] In some embodiments, the adenosine deaminase comprises one, two, three, four, five, or six mutations selected from the group consisting of H8Y, D108N, N127S, D147Y, R152C, and Q154H relative to the TadA reference sequence, or a corresponding mutation or mutations relative to another adenosine deaminase (e.g., ecTadA). In some embodiments, the adenosine deaminase comprises one, two, three, four, five, six, seven, or eight mutations selected from the group consisting of H8Y, M61I, M70V, D108N, N127S, Q154R, E155G and Q163H relative to the TadA reference sequence, or a corresponding mutation or mutations relative to another adenosine deaminase (e.g., ecTadA). In some embodiments, the adenosine deaminase comprises one, two, three, four, or five, mutations selected from the group consisting of H8Y, D108N, N127S, E155V, and T166P relative to the TadA reference sequence, or a corresponding mutation or mutations relative to another adenosine deaminase (e.g., ecTadA). In some embodiments, the adenosine deaminase comprises one, two, three, four, five, or six mutations selected from the group consisting of H8Y, A106T, D108N, N127S, E155D, and K161Q relative to the TadA reference sequence, or a corresponding mutation or mutations relative to another adenosine deaminase (e.g., ecTadA). In some embodiments, the adenosine deaminase comprises one, two, three, four, five, six, seven, or eight mutations selected from the group consisting of H8Y, R26W, L68Q, D108N, N127S, D147Y, and E155V relative to the TadA reference sequence, or a corresponding mutation or mutations relative to another adenosine deaminase (e.g., ecTadA). In some embodiments, the adenosine deaminase comprises one, two, three, four, or five, mutations selected from the group consisting of H8Y, D108N, A109T, N127S, and E155G relative to the TadA reference sequence, or a corresponding mutation or mutations relative to another adenosine deaminase (e.g., ecTadA).

[0416] Any of the mutations provided herein and any additional mutations (e.g., based on the ecTadA amino acid sequence) can be introduced into any other adenosine deaminases. Any of the mutations provided herein can be made individually or in any combination in TadA reference sequence or another adenosine deaminase (e.g., ecTadA).

[0417] Details of A to G nucleobase editing proteins are described in International PCT Application No. PCT/2017/045381 (WO2018/027078) and Gaudelli, N. M., et al., “Programmable base editing of A•T to G•C in genomic DNA without DNA cleavage” Nature, 551, 464-471 (2017), the entire contents of which are hereby incorporated by reference.

[0418] In some embodiments, the adenosine deaminase comprises one or more corresponding mutations relative to another adenosine deaminase (e.g., ecTadA). In some embodiments, the adenosine deaminase comprises a D108N, D108G, or D108V mutation relative to the TadA reference sequence, or corresponding mutations in another adenosine deaminase (e.g., ecTadA). In some embodiments, the adenosine deaminase comprises a A106V and D108N mutation relative to the TadA reference sequence, or corresponding mutations relative to another adenosine deaminase (e.g., ecTadA). In some embodiments, the adenosine deaminase comprises R107C and D108N mutations relative to the TadA reference sequence, or corresponding mutations relative to another adenosine deaminase (e.g., ecTadA). In some embodiments, the adenosine deaminase comprises a H8Y, D108N, N127S, D147Y, and Q154H mutation relative to the TadA reference sequence, or corresponding mutations relative to another adenosine deaminase (e.g., ecTadA). In some embodiments, the adenosine deaminase comprises a H8Y, D108N, N127S, D147Y, and E155V mutation relative to the TadA reference sequence, or corresponding mutations relative to another adenosine deaminase (e.g., ecTadA). In some embodiments, the adenosine deaminase comprises a D108N, D147Y, and E155V mutation relative to the TadA reference sequence, or corresponding mutations relative to another adenosine deaminase (e.g., ecTadA). In some embodiments, the adenosine deaminase comprises a H8Y, D108N, and N127S mutation relative to the TadA reference sequence, or corresponding mutations relative to another adenosine deaminase (e.g., ecTadA). In some embodiments, the adenosine deaminase comprises a A106V, D108N, D147Y and E155V mutation relative to the TadA reference sequence, or corresponding mutations relative to another adenosine deaminase (e.g., ecTadA).

[0419] In some embodiments, the adenosine deaminase comprises one or more of a S2X, H8X, I49X, L84X, H123X, N127X, I156X and/or K160X mutation relative to the TadA reference sequence, or one or more corresponding mutations relative to another adenosine deaminase, where the presence of X indicates any amino acid other than the corresponding amino acid in the wild-type adenosine deaminase. In some embodiments, the adenosine deaminase comprises one or more of S2A, H8Y, I49F, L84F, H123Y, N127S, I156F and/or K160S mutation relative to the TadA reference sequence, or one or more corresponding mutations relative to another adenosine deaminase (e.g., ecTadA).

[0420] In some embodiments, the adenosine deaminase comprises an L84X mutation adenosine deaminase, where X indicates any amino acid other than the corresponding amino acid in the wild-type adenosine deaminase. In some embodiments, the adenosine deaminase comprises an L84F mutation relative to the TadA reference sequence, or a corresponding mutation relative to another adenosine deaminase (e.g., ecTadA).

[0421] In some embodiments, the adenosine deaminase comprises an H123X mutation relative to the TadA reference sequence, or a corresponding mutation relative to another adenosine deaminase (e.g., ecTadA), where X indicates any amino acid other than the corresponding amino acid in the wild-type adenosine deaminase. In some embodiments, the adenosine deaminase comprises an H123Y mutation relative to the TadA reference sequence, or a corresponding mutation relative to another adenosine deaminase (e.g., ecTadA).

[0422] In some embodiments, the adenosine deaminase comprises an I156X mutation relative to the TadA reference sequence, or a corresponding mutation relative to another adenosine deaminase (e.g., ecTadA), where X indicates any amino acid other than the corresponding amino acid in the wild-type adenosine deaminase. In some embodiments, the adenosine deaminase comprises an I156F mutation relative to the TadA reference sequence, or a corresponding mutation relative to another adenosine deaminase (e.g., ecTadA).

[0423] In some embodiments, the adenosine deaminase comprises one, two, three, four, five, six, or seven mutations selected from the group consisting of L84X, A106X, D108X, H123X, D147X, E155X, and I156X relative to the TadA reference sequence, or a corresponding mutation or mutations relative to another adenosine deaminase (e.g., ecTadA), where X indicates the presence of any amino acid other than the corresponding amino acid in the wild-type adenosine deaminase. In some embodiments, the adenosine deaminase comprises one, two, three, four, five, or six mutations selected from the group consisting of S2X, I49X, A106X, D108X, D147X, and E155X relative to the TadA reference sequence, or a corresponding mutation or mutations relative to another adenosine deaminase (e.g., ecTadA), where X indicates the presence of any amino acid other than the corresponding amino acid in the wild-type adenosine deaminase. In some embodiments, the adenosine deaminase comprises one, two, three, four, or five, mutations selected from the group consisting of H8X, A106X, D108X, N127X, and K160X relative to the TadA reference sequence, or a corresponding mutation or mutations relative to another adenosine deaminase (e.g., ecTadA), where X indicates the presence of any amino acid other than the corresponding amino acid in the wild-type adenosine deaminase.

[0424] In some embodiments, the adenosine deaminase comprises one, two, three, four, five, six, or seven mutations selected from the group consisting of L84F, A106V, D108N, H123Y, D147Y, E155V, and I156F relative to the TadA reference sequence, or a corresponding mutation or mutations relative to another adenosine deaminase (e.g., ecTadA). In some embodiments, the adenosine deaminase comprises one, two, three, four, five, or six mutations selected from the group consisting of S2A, I49F, A106V, D108N, D147Y, and E155V relative to the TadA reference sequence, or a corresponding mutation or mutations relative to another adenosine deaminase.

[0425] In some embodiments, the adenosine deaminase comprises one, two, three, four, or five, mutations selected from the group consisting of H8Y, A106T, D108N, N127S, and K160S relative to the TadA reference sequence, or a corresponding mutation or mutations in another adenosine deaminase (e.g., ecTadA).

[0426] In some embodiments, the adenosine deaminase comprises one or more of a E25X, R26X, R107X, A142X, and/or A143X mutation relative to the TadA reference sequence, or one or more corresponding mutations relative to another adenosine deaminase (e.g., ecTadA), where the presence of X indicates any amino acid other than the corresponding amino acid in the wild-type adenosine deaminase. In some embodiments, the adenosine deaminase comprises one or more of E25M, E25D, E25A, E25R, E25V, E25S, E25Y, R26G, R26N, R26Q, R26C, R26L, R26K, R107P, R107K, R107A, R107N, R107W, R107H, R107S, A142N, A142D, A142G, A143D, A143G, A143E, A143L, A143W, A143M, A143S, A143Q and/or A143R mutation relative to the TadA reference sequence, or one or more corresponding mutations relative to another adenosine deaminase (e.g., ecTadA). In some embodiments, the adenosine deaminase comprises one or more of the mutations described herein corresponding to TadA reference sequence, or one or more corresponding mutations relative to another adenosine deaminase (e.g., ecTadA).

[0427] In some embodiments, the adenosine deaminase comprises an E25X mutation in TadA reference sequence, or a corresponding mutation in another adenosine deaminase (e.g., ecTadA), where X indicates any amino acid other than the corresponding amino acid in the wild-type adenosine deaminase. In some embodiments, the adenosine deaminase comprises an E25M, E25D, E25A, E25R, E25V, E25S, or E25Y mutation relative to the TadA reference sequence, or a corresponding mutation relative to another adenosine deaminase (e.g., ecTadA).

[0428] In some embodiments, the adenosine deaminase comprises an R26X mutation relative to the TadA reference sequence, or a corresponding mutation relative to another adenosine deaminase (e.g., ecTadA), where X indicates any amino acid other than the corresponding amino acid in the wild-type adenosine deaminase. In some embodiments, the adenosine deaminase comprises R26G, R26N, R26Q, R26C, R26L, or R26K mutation relative to the TadA reference sequence, or a corresponding mutation relative to another adenosine deaminase (e.g., ecTadA).

[0429] In some embodiments, the adenosine deaminase comprises an R107X mutation relative to the TadA reference sequence, or a corresponding mutation relative to another adenosine deaminase (e.g., ecTadA), where X indicates any amino acid other than the corresponding amino acid in the wild-type adenosine deaminase. In some embodiments, the adenosine deaminase comprises an R107P, R107K, R107A, R107N, R107W, R107H, or R107S mutation relative to the TadA reference sequence, or a corresponding mutation relative to another adenosine deaminase (e.g., ecTadA).

[0430] In some embodiments, the adenosine deaminase comprises an A142X mutation in TadA reference sequence, or a corresponding mutation in another adenosine deaminase (e.g., ecTadA), where X indicates any amino acid other than the corresponding amino acid in the wild-type adenosine deaminase. In some embodiments, the adenosine deaminase comprises an A142N, A142D, A142G, mutation in TadA reference sequence, or a corresponding mutation in another adenosine deaminase (e.g., ecTadA).

[0431] In some embodiments, the adenosine deaminase comprises an A143X mutation relative to the TadA reference sequence, or a corresponding mutation relative to another adenosine deaminase (e.g., ecTadA), where X indicates any amino acid other than the corresponding amino acid in the wild-type adenosine deaminase. In some embodiments, the adenosine deaminase comprises an A143D, A143G, A143E, A143L, A143W, A143M, A143S, A143Q and/or A143R mutation relative to the TadA reference sequence, or a corresponding mutation relative to another adenosine deaminase (e.g., ecTadA).

[0432] In some embodiments, the adenosine deaminase comprises one or more of a H36X, N37X, P48X, I49X, R51X, M70X, N72X, D77X, E134X, S146X, Q154X, K157X, and/or K161X mutation relative to the TadA reference sequence, or one or more corresponding mutations relative to another adenosine deaminase (e.g., ecTadA), where the presence of X indicates any amino acid other than the corresponding amino acid in the wild-type adenosine deaminase. In some embodiments, the adenosine deaminase comprises one or more of H36L, N37T, N37S, P48T, P48L, I49V, R51H, R51L, M70L, N72S, D77G, E134G, S146R, S146C, Q154H, K157N, and/or K161T mutation relative to the TadA reference sequence, or one or more corresponding mutations relative to another adenosine deaminase (e.g., ecTadA).

[0433] In some embodiments, the adenosine deaminase comprises an H36X mutation relative to the TadA reference sequence, or a corresponding mutation relative to another adenosine deaminase (e.g., ecTadA), where X indicates any amino acid other than the corresponding amino acid in the wild-type adenosine deaminase. In some embodiments, the adenosine deaminase comprises an H36L mutation relative to the TadA reference sequence, or a corresponding mutation relative to another adenosine deaminase (e.g., ecTadA).

[0434] In some embodiments, the adenosine deaminase comprises an N37X mutation relative to the TadA reference sequence, or a corresponding mutation relative to another adenosine deaminase (e.g., ecTadA), where X indicates any amino acid other than the corresponding amino acid in the wild-type adenosine deaminase. In some embodiments, the adenosine deaminase comprises an N37T, or N37S mutation relative to the TadA reference sequence, or a corresponding mutation relative to another adenosine deaminase (e.g., ecTadA).

[0435] In some embodiments, the adenosine deaminase comprises an P48X mutation relative to the TadA reference sequence, or a corresponding mutation relative to another adenosine deaminase (e.g., ecTadA), where X indicates any amino acid other than the corresponding amino acid in the wild-type adenosine deaminase. In some embodiments, the adenosine deaminase comprises an P48T, or P48L mutation relative to the TadA reference sequence, or a corresponding mutation relative to another adenosine deaminase (e.g., ecTadA).

[0436] In some embodiments, the adenosine deaminase comprises an R51X mutation relative to the TadA reference sequence, or a corresponding mutation relative to another adenosine deaminase, where X indicates any amino acid other than the corresponding amino acid in the wild-type adenosine deaminase. In some embodiments, the adenosine deaminase comprises an R51H, or R51L mutation relative to the TadA reference sequence, or a corresponding mutation relative to another adenosine deaminase (e.g., ecTadA).

[0437] In some embodiments, the adenosine deaminase comprises an S146X mutation relative to the TadA reference sequence, or a corresponding mutation relative to another adenosine deaminase (e.g., ecTadA), where X indicates any amino acid other than the corresponding amino acid in the wild-type adenosine deaminase. In some embodiments, the adenosine deaminase comprises an S146R, or S146C mutation relative to the TadA reference sequence, or a corresponding mutation relative to another adenosine deaminase (e.g., ecTadA).

[0438] In some embodiments, the adenosine deaminase comprises an K157X mutation relative to the TadA reference sequence, or a corresponding mutation relative to another adenosine deaminase (e.g., ecTadA), where X indicates any amino acid other than the corresponding amino acid in the wild-type adenosine deaminase. In some embodiments, the adenosine deaminase comprises a K157N mutation relative to the TadA reference sequence, or a corresponding mutation relative to another adenosine deaminase (e.g., ecTadA).

[0439] In some embodiments, the adenosine deaminase comprises an P48X mutation relative to the TadA reference sequence, or a corresponding mutation relative to the another adenosine deaminase (e.g., ecTadA), where X indicates any amino acid other than the corresponding amino acid in the wild-type adenosine deaminase. In some embodiments, the adenosine deaminase comprises a P48S, P48T, or P48A mutation relative to the TadA reference sequence, or a corresponding mutation relative to another adenosine deaminase (e.g., ecTadA).

[0440] In some embodiments, the adenosine deaminase comprises an A142X mutation relative to the TadA reference sequence, or a corresponding mutation relative to another adenosine deaminase (e.g., ecTadA), where X indicates any amino acid other than the corresponding amino acid in the wild-type adenosine deaminase. In some embodiments, the adenosine deaminase comprises a A142N mutation relative to the TadA reference sequence, or a corresponding mutation relative to another adenosine deaminase (e.g., ecTadA).

[0441] In some embodiments, the adenosine deaminase comprises an W23X mutation relative to the TadA reference sequence, or a corresponding mutation relative to another adenosine deaminase (e.g., ecTadA), where X indicates any amino acid other than the corresponding amino acid in the wild-type adenosine deaminase. In some embodiments, the adenosine deaminase comprises a W23R, or W23L mutation relative to the TadA reference sequence, or a corresponding mutation relative to another adenosine deaminase (e.g., ecTadA).

[0442] In some embodiments, the adenosine deaminase comprises an R152X mutation relative to the TadA reference sequence, or a corresponding mutation relative to another adenosine deaminase (e.g., ecTadA), where X indicates any amino acid other than the corresponding amino acid in the wild-type adenosine deaminase. In some embodiments, the adenosine deaminase comprises a R152P, or R52H mutation relative to the TadA reference sequence, or a corresponding mutation relative to another adenosine deaminase (e.g., ecTadA).

[0443] In one embodiment, the adenosine deaminase may comprise the mutations H36L, R51L, L84F, A106V, D108N, H123Y, S146C, D147Y, E155V, I156F, and K157N relative to the TadA reference sequence, or a corresponding mutation relative to another adenosine deaminase. In some embodiments, the adenosine deaminase comprises the following combination of mutations relative to the TadA reference sequence, where each mutation of a combination is separated by a “_” and each combination of mutations is between parentheses:
[0444] (A106V_D108N),
[0445] (R107C_D108N),
[0446] (H8Y_D108N_N127S_D147Y_Q154H),
[0447] (H8Y_D108N_N127S_D147Y_E155V),
[0448] (D108N D147Y_E155V),
[0449] (H8Y_D108N_N127S),
[0450] (H8Y_D108N_N127S_D147Y_Q154H),
[0451] (A106V_D108N_D147Y_E155V),
[0452] (D108Q_D147Y_E155V),
[0453] (D108M_D147Y_E155V),
[0454] (D108L_D147Y_E155V),
[0455] (D108K_D147Y_E155V),
[0456] (D108I_D147Y_E155V),
[0457] (D108F_D147Y_E155V),
[0458] (A106V_D108N_D147Y),
[0459] (A106V_D108M_D147Y E155V),
[0460] (E59A_A106V_D108N_D147Y_E155V),
[0461] (E59A cat dead_A106V_D108N_D147Y_E155V),
[0462] (L84F_A106V_D108N_H123Y_D147Y_E155V_I156Y),
[0463] (L84F_A106V_D108N_H123Y_D147Y_E155V_I156F),
[0464] (R26G_L84F_A106V_R107H_D108N_H123Y_A142N_A143D_D147Y_E155V_I156F),
[0465] (E25G_R26G_L84F_A106V_R107H_D108N_H123Y_A142N_A143D_D147Y_E155V_I156F),(E25D_R26G_L84F_A106V_R107K_D108N_H123Y_A142N_A143G_D147Y_E155V_I156F),
[0466] (R26Q_L84F_A106V_D108N_H123Y_A142N_D147Y_E155V_I156F),
[0467] (E25M_R26G_L84F_A106V_R107P_D108N H123Y_A142N_A143D_D147Y E155V_I156F),
[0468] (R26C_L84F_A106V_R107H_D108N_H123Y_A142N_D147Y_E155V_I156F),
[0469] (L84F_A106V_D108N_H123Y_A142N_A143L_D147Y_E155V_I156F),
[0470] (R26G_L84FA106V_D108N_H123Y_A142N_D147Y_E155V_I156F),
[0471] (E25A_R26G_L84F_A106V_R107N_D108N_H123Y_A142N_A143E_D147Y E155V_I156F),
[0472] (R26G_L84F_A106V_R107H_D108N_H123Y_A142N_A143D_D147Y_E155V_I156F),
[0473] (A106V_D108N_A142N_D147Y_E155V),
[0474] (R26G_A106V_D108N_A142N_D147Y_E155V),
[0475] (E25D_R26G_A106V_R107K_D108N_A142N_A143G_D147Y_E155V),
[0476] (R26G_A106V_D108N_R107H_A142N_A143D_D147Y_E155V),
[0477] (E25D_R26G_A106V_D108N_A142N_D147Y_E155V),
[0478] (A106V_R107K_D108NA142N_D147Y_E155V),
[0479] (A106V_D108N_A142N_A143G_D147Y_E155V),
[0480] (A106V_D108N_A142N_A143L_D147Y_E155V),
[0481] (H36L_R51L_L84F_A106V_D108N_H123Y_S146C_D147Y_E155V_I156F_K157N),
[0482] (N37T_P48T_M70L_L84F_A106V_D108N_H123Y_D147Y_I49V_E155V_I156F),
[0483] (N37S_L84F_A106V_D108N_H123Y_D147Y_E155V_I156F_K161T),
[0484] (H36L_L84F_A106V D108N_H123Y_D147Y_Q154H_E155V_I156F),
[0485] (N72S_L84F_A106V_D108N_H123Y_S146R_D147Y_E155V I156F),
[0486] (H36L_P48L_L84F_A106V_D108N_H123Y_E134G_D147Y_E155V_I156F),
[0487] (H36L_L84F_A106V_D108N_H123Y_D147Y_E155V_I156F_K157N),
[0488] (H36L_L84F_A106V_D108N_H123Y_S146C_D147Y_E155V_I156F),
[0489] (L84F_A106V_D108N_H123Y_S146R_D147Y_E155V_I156F_K161T),
[0490] (N37S_R51H_D77G_L84F_A106V_D108N_H123Y_D147Y_E155V_I156F),
[0491] (R51L_L84F_A106V_D108N_H123Y_D147Y_E155V_I156F_K157N),
[0492] (D24G_Q71R_L84F_H96L_A106V_D108N_H123Y_D147Y_E155V_I156F_K160E),
[0493] (H36L_G67V_L84F_A106V_D108N_H123Y_S146T_D147Y_E155V_I156F),
[0494] (Q71L_L84F_A106V_D108N_H123Y_L137M_A143E_D147Y_E155V_I156F),
[0495] (E25G_L84F_A106V_D108N_H123Y_D147Y_E155V_I156F_Q159L),
[0496] (L84F_A91T_F104I_A106V_D108NH123Y_D147Y_E155V_I156F),
[0497] (N72D_L84F_A106V_D108N_H123Y_G125A_D147Y_E155V_I156F),
[0498] (P48S_L84F_S97C_A106V_D108N_H123Y_D147Y_E155V_I156F),
[0499] (W23G_L84F_A106V_D108N_H123Y_D147Y_E155V_I156F),
[0500] (D24G_P48L_Q71R_L84F_A106V_D108N_H123Y_D147Y_E155V_I156F_Q159L),
[0501] (L84F_A106V_D108N_H123Y_A142N_D147Y_E155V_I156F),
[0502] (H36L_R51L_L84F_A106V_D108N_H123Y_A142N_S146C_D147Y_E155V_I156F_K157N), (N37S_L84F_A106V_D108N_H123Y_A142N_D147Y_E155V_I156F_K161T),
[0503] (L84F_A106V_D108N_D147Y_E155V_I156F),
[0504] (R51L_L84F_A106V_D108NH123Y_S146C_D147Y_E155V_I156F_K157N_K161T),
[0505] (L84F_A106V_D108N_H123Y_S146C_D147Y_E155V_I156F_K161T),
[0506] (L84F_A106V_D108N_H123Y_S146C_D147Y_E155V_I156F_K157N_K160E_K161T),
[0507] (L84F_A106V_D108N_H123Y_S146C_D147Y_E155V_I156F_K157N_K160E),
[0508] (R74Q_L84F_A106V_D108N_H123Y_D147Y_E155V_I156F),
[0509] (R74A_L84F_A106V_D108N_H123Y_D147Y_E155V_I156F),
[0510] (L84F_A106V_D108N_H123Y_D147Y_E155V_I156F),
[0511] (R74Q_L84F_A106V_D108N_H123Y_D147Y_E155V_I156F),
[0512] (L84F_R98Q_A106V_D108N_H123Y_D147Y_E155V_I156F),
[0513] (L84F_A106V_D108N_H123Y_R129Q_D147Y_E155V_I156F),
[0514] (P48S_L84F_A106V_D108N_H123Y_A142N_D147Y_E155V_I156F),
[0515] (P48S_A142N),
[0516] (P48T_I49V_L84F_A106V_D108N_H123Y_A142N_D147Y_E155V_I156F_L157N),
[0517] (P48T_I49V_A142N),
[0518] (H36L_P48S_R51L_L84F_A106V_D108N_H123Y_S146C_D147Y_E155V_I156F_K157N),
[0519] (H36L_P48S_R51L_L84F_A106V_D108N_H123Y_S146C_A142N_D147Y_E155V_I156F
[0520] (H36L_P48T_I49V_R51L_L84F_A106V_D108N_H123Y_S146C_D147Y_E155V_I156F_K157N),
[0521] (H36L_P48T_I49V_R51L_L84F_A106V_D108N_H123Y_A142N_S146C_D147Y_E155V_I156F_K157N),
[0522] (H36L_P48A_R51L_L84F_A106V_D108N_H123Y_S146C_D147Y_E155V_I156F_K157N),
[0523] (H36L_P48A_R51L_L84F_A106V_D108N_H123Y_A142N_S146C_D147Y_E155V_I156F_K157N),
[0524] (H36L_P48A_R51L_L84F_A106V_D108N_H123Y_S146C_A142N_D147Y_E155V_I156F_K157N),
[0525] (W23L_H36L_P48A_R51L_L84F_A106V_D108N_H123Y_S146C_D147Y_E155V_I156F_K157N),
[0526] (W23R_H36L_P48A_R51L_L84F_A106V_D108N_H123Y_S146C_D147Y_E155V_I156F_K157N),
[0527] (W23L_H36L_P48A_R51L_L84F_A106V_D108N_H123Y_S146R_D147Y_E155V_I156F_K161T),
[0528] (H36L_P48A_R51L_L84F_A106V_D108N_H123Y_S146C_D147Y_R152H_E155V_I156F_K157N),
[0529] (H36L_P48A_R51L_L84F_A106V_D108N_H123Y_S146C_D147Y_R152P_E155V_I156F_K157N),
[0530] (W23L_H36L_P48A_R51L_L84F_A106V_D108N_H123Y_S146C_D147Y_R152P_E155V_I156F_K157N),
[0531] (W23L_H36L_P48A_R51L_L84F_A106V_D108N_H123Y_A142A_S146C_D147Y_E155V_I156F_K157N),
[0532] (W23L_H36L_P48A_R51L_L84F_A106V_D108N_H123Y_A142A_S146C_D147Y_R152P_E155V_I156F_K157N),
[0533] (W23L_H36L_P48A_R51L_L84F_A106V_D108N_H123Y_S146R_D147Y_E155V_I156F_K161T),
[0534] (W23R_H36L_P48A_R51L_L84F_A106V_D108N_H123Y_S146C_D147Y_R152P_E155V_I156F_K157N),
[0535] (H36L_P48A_R51L_L84F_A106V_D108N_H123Y_A142N_S146C_D147Y_R152P_E155V_I156F_K157N).

[0536] In certain embodiments, the fusion proteins provided herein comprise one or more features that improve the base editing activity of the fusion proteins. For example, any of the fusion proteins provided herein may comprise a Cas9 domain that has reduced nuclease activity. In some embodiments, any of the fusion proteins provided herein may have a Cas9 domain that does not have nuclease activity (dCas9), or a Cas9 domain that cuts one strand of a duplexed DNA molecule, referred to as a Cas9 nickase (nCas9).

[0537] In some embodiments, the adenosine deaminase is TadA*7.10. In some embodiments, TadA*7.10 comprises at least one alteration. In particular embodiments, TadA*7.10 comprises one or more of the following alterations: Y147T, Y147R, Q154S, Y123H, V82S, T166R, and Q154R. The alteration Y123H is also referred to herein as H123H (the alteration H123Y in TadA*7.10 reverted back to Y123H (wt)). In other embodiments, the TadA*7.10 comprises a combination of alterations selected from the group of: Y147T+Q154R; Y147T+Q154S; Y147R+Q154S; V82S+Q154S; V82S+Y147R; V82S+Q154R; V82S+Y123H; I76Y+V82S; V82S+Y123H+Y147T; V82S+Y123H+Y147R; V82S+Y123H+Q154R; Y147R+Q154R+Y123H; Y147R+Q154R+I76Y; Y147R+Q154R+T166R; Y123H+Y147R+Q154R+I76Y; V82S+Y123H+Y147R+Q154R; and I76Y+V82S+Y123H+Y147R+Q154R. In particular embodiments, an adenosine deaminase variant comprises a deletion of the C terminus beginning at residue 149, 150, 151, 152, 153, 154, 155, 156, and 157, relative to TadA*7.10, the TadA reference sequence, or a corresponding mutation in another TadA.

[0538] In other embodiments, a base editor of the invention is a monomer comprising an adenosine deaminase variant (e.g., TadA*8) comprising one or more of the following alterations: Y147T, Y147R, Q154S, Y123H, V82S, T166R, and/or Q154R, relative to TadA*7.10, the TadA reference sequence, or a corresponding mutation in another TadA. In other embodiments, the adenosine deaminase variant (TadA*8) is a monomer comprising a combination of alterations selected from the group of: Y147T+Q154R; Y147T+Q154S; Y147R+Q154S; V82S+Q154S; V82S+Y147R; V82S+Q154R; V82S+Y123H; I76Y+V82S; V82S+Y123H+Y147T; V82S+Y123H+Y147R; V82S+Y123H+Q154R; Y147R+Q154R+Y123H; Y147R+Q154R+I76Y; Y147R+Q154R+T166R; Y123H+Y147R+Q154R+I76Y; V82S+Y123H+Y147R+Q154R; and I76Y+V82S+Y123H+Y147R+Q154R, relative to TadA*7.10, the TadA reference sequence, or a corresponding mutation in another TadA. In other embodiments, a base editor is a heterodimer comprising a wild-type adenosine deaminase and an adenosine deaminase variant (e.g., TadA*8) comprising one or more of the following alterations Y147T, Y147R, Q154S, Y123H, V82S, T166R, and/or Q154R, relative to TadA*7.10, the TadA reference sequence, or a corresponding mutation in another TadA. In other embodiments, the base editor is a heterodimer comprising a TadA*7.10 domain and an adenosine deaminase variant domain (e.g., TadA*8) comprising a combination of alterations selected from the group of: Y147T+Q154R; Y147T+Q154S; Y147R+Q154S; V82S+Q154S; V82S+Y147R; V82S+Q154R; V82S+Y123H; I76Y+V82S; V82S+Y123H+Y147T; V82S+Y123H+Y147R; V82S+Y123H+Q154R; Y147R+Q154R+Y123H; Y147R+Q154R+I76Y; Y147R+Q154R+T166R; Y123H+Y147R+Q154R+I76Y; V82S+Y123H+Y147R+Q154R; and I76Y+V82S+Y123H+Y147R+Q154R, relative to TadA*7.10, the TadA reference sequence, or a corresponding mutation in another TadA.

[0539] In one embodiment, an adenosine deaminase is a TadA*8 that comprises or consists essentially of the following sequence or a fragment thereof having adenosine deaminase activity:

MSEVEFSHEYWMRHALTLAKRARDEREVPVGAVLVLNNRVIGEGWNRAIG
LHDPTAHAEIMALRQGGLVMQNYRLIDATLYVTFEPCVMCAGAMIHSRIG
RVVFGVRNAKTGAAGSLMDVLHYPGMNHRVEITEGILADECAALLCTFFR
MPRQVFNAQKKAQSSTD

[0540] In some embodiments, the TadA*8 is a truncated. In some embodiments, the truncated TadA*8 is missing 1, 2, 3, 4, 5 ,6, 7, 8, 9, 10, 11, 12, 13, 14, 15, 6, 17, 18, 19, or 20 N-terminal amino acid residues relative to the full length TadA*8. In some embodiments, the truncated TadA*8 is missing 1, 2, 3, 4, 5 ,6, 7, 8, 9, 10, 11, 12, 13, 14, 15, 6, 17, 18, 19, or 20 C-terminal amino acid residues relative to the full length TadA*8. In some embodiments the adenosine deaminase variant is a full-length TadA*8.

[0541] In some embodiments the TadA*8 is TadA*8.1, TadA*8.2, TadA*8.3, TadA*8.4, TadA*8.5, TadA*8.6, TadA*8.7, TadA*8.8, TadA*8.9, TadA*8.10, TadA*8.11, TadA*8.12, TadA*8.13, TadA*8.14, TadA*8.15, TadA*8.16, TadA*8.17, TadA*8.18, TadA*8.19, TadA*8.20, TadA*8.21, TadA*8.22, TadA*8.23, TadA*8.24.

[0542] In one embodiment, a fusion protein of the invention comprises a wild-type TadA is linked to an adenosine deaminase variant described herein (e.g., TadA*8), which is linked to

[0543] Cas9 nickase. In particular embodiments, the fusion proteins comprise a single TadA*8 domain (e.g., provided as a monomer). In other embodiments, the base editor comprises TadA*8 and TadA(wt), which are capable of forming heterodimers. Exemplary sequences follow:

TadA(wt):
MSEVEFSHEYWMRHALTLAKRAWDEREVPVGAVLVHNNRVIGEGWNRPIG
RHDPTAHAEIMALRQGGLVMQNYRLIDATLYVTLEPCVMCAGAMIHSRIG
RVVFGARDAKTGAAGSLMDVLHHPGMNHRVEITEGILADECAALLSDFFR
MRRQEIKAQKKAQSSTD
TadA*7.10:
MSEVEFSHEYWMRHALTLAKRARDEREVPVGAVLVLNNRVIGEGWNRAIG
LHDPTAHAEIMALRQGGLVMQNYRLIDATLYVTFEPCVMCAGAMIHSRIG
RVVFGVRNAKTGAAGSLMDVLHYPGMNHRVEITEGILADECAALLCYFFR
MPRQVFNAQKKAQSSTD
TadA*8:
MSEVEFSHEYWMRHALTLAKRARDEREVPVGAVLVLNNRVIGEGWNRAIG
LHDPTAHAEIMALRQGGLVMQNYRLIDATLYVTFEPCVMCAGAMIHSRIG
RVVFGVRNAKTGAAGSLMDVLHYPGMNHRVEITEGILADECAALLCTFFR
MPRQVFNAQKKAQSSTD.

[0544] In some embodiments, the adenosine deaminase comprises an amino acid sequence that is at least 60%, at least 65%, at least 70%, at least 75%, at least 80%, at least 85%, at least 90%, at least 95%, at least 96%, at least 97%, at least 98%, at least 99%, or at least 99.5% identical to any one of the amino acid sequences set forth in any of the adenosine deaminases provided herein. It should be appreciated that adenosine deaminases provided herein may include one or more mutations (e.g., any of the mutations provided herein). The disclosure provides any deaminase domains with a certain percent identity plus any of the mutations or combinations thereof described herein. In some embodiments, the adenosine deaminase comprises an amino acid sequence that has 1, 2, 3, 4, 5, 6, 7, 8, 9, 10, 11, 12, 13, 14, 15, 16, 17, 18, 19, 20, 21, 22, 21, 24, 25, 26, 27, 28, 29, 30, 31, 32, 33, 34, 35, 36, 37, 38, 39, 40, 41, 42, 43, 44, 45, 46, 47, 48, 49, 50, or more mutations compared to a reference sequence, or any of the adenosine deaminases provided herein. In some embodiments, the adenosine deaminase comprises an amino acid sequence that has at least 5, at least 10, at least 15, at least 20, at least 25, at least 30, at least 35, at least 40, at least 45, at least 50, at least 60, at least 70, at least 80, at least 90, at least 100, at least 110, at least 120, at least 130, at least 140, at least 150, at least 160, or at least 170 identical contiguous amino acid residues as compared to any one of the amino acid sequences known in the art or described herein.

[0545] In particular embodiments, a TadA*8 comprises one or more mutations at any of the following positions shown in bold. In other embodiments, a TadA*8 comprises one or more mutations at any of the positions shown with underlining:

| | |
|---|---|
| MSEVEFSHEY WMRHALTLAK RARDEREVPV GAVLVLNNRV IGEGWNRAIG | 50 |
| LHDPTAHAEI MALRQGGLVM QNYRLIDATL YVTFEPCVMC AGAMIHSRIG | 100 |
| RVVFGVRNAK TGAAGSLMDV LHYPGMNHRV EITEGILADE CAALLCYFFR | 150 |
| MPRQVFNAQK KAQSSTD | |

[0546] For example, the TadA*8 comprises alterations at amino acid position 82 and/or 166 (e.g., V82S, T166R) alone or in combination with any one or more of the following Y147T, Y147R, Q154S, Y123H, and/or Q154R, relative to TadA*7.10, the TadA reference sequence, or a corresponding mutation in another TadA. In particular embodiments, a combination of alterations are selected from the group of: Y147T+Q154R; Y147T+Q154S; Y147R+Q154S; V82S+Q154S; V82S+Y147R; V82S+Q154R; V82S+Y123H; I76Y+V82S; V82S+Y123H+Y147T; V82S+Y123H+Y147R; V82S+Y123H+Q154R; Y147R+Q154R+Y123H; Y147R+Q154R+I76Y; Y147R+Q154R+T166R; Y123H+Y147R+Q154R+I76Y; V82S+Y123H+Y147R+Q154R; and I76Y+V82S+Y123H+Y147R+Q154R, relative to TadA*7.10, the TadA reference sequence, or a corresponding mutation in another TadA.

[0547] In some embodiments, the adenosine deaminase is TadA*8, which comprises or consists essentially of the following sequence or a fragment thereof having adenosine deaminase activity:

MSEVEFSHEY WMRHALTLAK RARDEREVPV GAVLVLNNRV
IGEGWNRAIG LHDPTAHAEI MALRQGGLVM QNYRLIDATL
YVTFEPCVMC AGAMIHSRIG RVVFGVRNAK TGAAGSLMDV
LHYPGMNHRV EITEGILADE CAALLCTFFR MPRQVFNAQK
KAQSSTD

[0548] In some embodiments, the TadA*8 is truncated. In some embodiments, the truncated TadA*8 is missing 1, 2, 3, 4, 5 ,6, 7, 8, 9, 10, 11, 12, 13, 14, 15, 6, 17, 18, 19, or 20 N-terminal amino acid residues relative to the full length TadA*8. In some embodiments, the truncated TadA*8 is missing 1, 2, 3, 4, 5 ,6, 7, 8, 9, 10, 11, 12, 13, 14, 15, 6, 17, 18, 19, or 20 C-terminal amino acid residues relative to the full length TadA*8. In some embodiments the adenosine deaminase variant is a full-length TadA*8.

[0549] In one embodiment, a fusion protein of the invention comprises a wild-type TadA is linked to an adenosine deaminase variant described herein (e.g., TadA*8), which is linked to Cas9 nickase. In particular embodiments, the fusion proteins comprise a single TadA*8 domain (e.g., provided as a monomer). In other embodiments, the base editor comprises TadA*8 and TadA(wt), which are capable of forming heterodimers.

### Additional Domains

[0550] A base editor described herein can include any domain which helps to facilitate the nucleobase editing, modification or altering of a nucleobase of a polynucleotide. In some embodiments, a base editor comprises a polynucleotide programmable nucleotide binding domain (e.g., Cas9), a nucleobase editing domain (e.g., deaminase domain), and one or more additional domains. In some embodiments, the additional domain can facilitate enzymatic or catalytic functions of the base editor, binding functions of the base editor, or be inhibitors of cellular machinery (e.g., enzymes) that could interfere with the desired base editing result. In some embodiments, a base editor can comprise a nuclease, a nickase, a recombinase, a deaminase, a methyltransferase, a methylase, an acetylase, an acetyltransferase, a transcriptional activator, or a transcriptional repressor domain.

[0551] In some embodiments, a base editor can comprise an uracil glycosylase inhibitor (UGI) domain. In some embodiments, cellular DNA repair response to the presence of U: G heteroduplex DNA can be responsible for a decrease in nucleobase editing efficiency in cells. In such embodiments, uracil DNA glycosylase (UDG) can catalyze removal of U from DNA in cells, which can initiate base excision repair (BER), mostly resulting in reversion of the U:G pair to a C:G pair. In such embodiments, BER can be inhibited in base editors comprising one or more domains that bind the single strand, block the edited base, inhibit UGI, inhibit BER, protect the edited base, and/or promote repairing of the non-edited strand. Thus, this disclosure contemplates a base editor fusion protein comprising a UGI domain.

[0552] In some embodiments, a base editor comprises as a domain all or a portion of a double-strand break (DSB) binding protein. For example, a DSB binding protein can include a Gam protein of bacteriophage Mu that can bind to the ends of DSBs and can protect them from degradation. See Komor, A. C., et al., “Improved base excision repair inhibition and bacteriophage Mu Gam protein yields C:G-to-T:A base editors with higher efficiency and product purity” Science Advances 3:eaao4774 (2017), the entire content of which is hereby incorporated by reference.

[0553] Additionally, in some embodiments, a Gam protein can be fused to an N terminus of a base editor. In some embodiments, a Gam protein can be fused to a C-terminus of a base editor. The Gam protein of bacteriophage Mu can bind to the ends of double strand breaks (DSBs) and protect them from degradation. In some embodiments, using Gam to bind the free ends of DSB can reduce indel formation during the process of base editing. In some embodiments, 174-residue Gam protein is fused to the N terminus of the base editors. See. Komor, A. C., et al., “Improved base excision repair inhibition and bacteriophage Mu Gam protein yields C:G-to-T:A base editors with higher efficiency and product purity” Science Advances 3:eaao4774 (2017). In some embodiments, a mutation or mutations can change the length of a base editor domain relative to a wild-type domain. For example, a deletion of at least one amino acid in at least one domain can reduce the length of the base editor. In another case, a mutation or mutations do not change the length of a domain relative to a wild-type domain. For example, substitution(s) in any domain does/do not change the length of the base editor.

[0554] In some embodiments, a base editor can comprise as a domain all or a portion of a nucleic acid polymerase (NAP). For example, a base editor can comprise all or a portion of a eukaryotic NAP. In some embodiments, a NAP or portion thereof incorporated into a base editor is a DNA polymerase. In some embodiments, a NAP or portion thereof incorporated into a base editor has translesion polymerase activity. In some embodiments, a NAP or portion thereof incorporated into a base editor is a translesion DNA polymerase. In some embodiments, a NAP or portion thereof incorporated into a base editor is a Rev7, Rev1 complex, polymerase iota, polymerase kappa, or polymerase eta. In some embodiments, a NAP or portion thereof incorporated into a base editor is a eukaryotic polymerase alpha, beta, gamma, delta, epsilon, gamma, eta, iota, kappa, lambda, mu, or nu component. In some embodiments, a NAP or portion thereof incorporated into a base editor comprises an amino acid sequence that is at least 75%, 80%, 85%, 90%, 95%, 96%, 97%, 98%, 99%, or 99.5% identical to a nucleic acid polymerase (e.g., a translesion DNA polymerase).

### Base Editor System

[0555] Use of the base editor system provided herein comprises the steps of: (a) contacting a target nucleotide sequence of a polynucleotide (e.g., double- or single stranded DNA or RNA) of a subject with a base editor system comprising a nucleobase editor (e.g., an adenosine base editor) and a guide polynucleic acid (e.g., gRNA), wherein the target nucleotide sequence comprises a targeted nucleobase pair; (b) inducing strand separation of said target region; (c) converting a first nucleobase of said target nucleobase pair in a single strand of the target region to a second nucleobase; and (d) cutting no more than one strand of said target region, where a third nucleobase complementary to the first nucleobase base is replaced by a fourth nucleobase complementary to the second nucleobase. It should be appreciated that in some embodiments, step (b) is omitted. In some embodiments, said targeted nucleobase pair is a plurality of nucleobase pairs in one or more genes. In some embodiments, the base editor system provided herein is capable of multiplex editing of a plurality of nucleobase pairs in one or more genes. In some embodiments, the plurality of nucleobase pairs is located in the same gene. In some embodiments, the plurality of nucleobase pairs is located in one or more genes, wherein at least one gene is located in a different locus.

[0556] In some embodiments, the cut single strand (nicked strand) is hybridized to the guide nucleic acid. In some embodiments, the cut single strand is opposite to the strand comprising the first nucleobase. In some embodiments, the base editor comprises a Cas9 domain. In some embodiments, the first base is adenine, and the second base is not a G, C, A, or T. In some embodiments, the second base is inosine.

[0557] Base editing system as provided herein provides a new approach to genome editing that uses a fusion protein containing a catalytically defective Streptococcus pyogenes Cas9, an adenosine deaminase, and an inhibitor of base excision repair to induce programmable, single nucleotide (C→T or A→G) changes in DNA without generating double-strand DNA breaks, without requiring a donor DNA template, and without inducing an excess of stochastic insertions and deletions.

[0558] Provided herein are systems, compositions, and methods for editing a nucleobase using a base editor system. In some embodiments, the base editor system comprises (1) a base editor (BE) comprising a polynucleotide programmable nucleotide binding domain and a nucleobase editing domain (e.g., a deaminase domain) for editing the nucleobase; and (2) a guide polynucleotide (e.g., guide RNA) in conjunction with the polynucleotide programmable nucleotide binding domain. In some embodiments, the base editor system comprises an adenosine base editor (ABE). In some embodiments, the polynucleotide programmable nucleotide binding domain is a polynucleotide programmable DNA binding domain. In some embodiments, the polynucleotide programmable nucleotide binding domain is a polynucleotide programmable RNA binding domain. In some embodiments, the nucleobase editing domain is a deaminase domain. In some embodiments, a deaminase domain can be an adenine deaminase or an adenosine deaminase. In some embodiments, the adenosine base editor can deaminate adenine in DNA. In some embodiments, ABE comprises an evolved TadA variant.

[0559] Details of nucleobase editing proteins are described in International PCT Application Nos. PCT/2017/045381 (WO2018/027078) and PCT/US2016/058344 (WO2017/070632), each of which is incorporated herein by reference for its entirety. Also see Komor, A. C., et al., “Programmable editing of a target base in genomic DNA without double-stranded DNA cleavage” Nature 533, 420-424 (2016); Gaudelli, N. M., et al., “Programmable base editing of A•T to G•C in genomic DNA without DNA cleavage” Nature 551, 464-471 (2017); and Komor, A. C., et al., “Improved base excision repair inhibition and bacteriophage Mu Gam protein yields C:G-to-T:A base editors with higher efficiency and product purity” Science Advances 3:eaao4774 (2017), the entire contents of which are hereby incorporated by reference.

[0560] In some embodiments, a single guide polynucleotide may be utilized to target a deaminase to a target nucleic acid sequence. In some embodiments, a single pair of guide polynucleotides may be utilized to target different deaminases to a target nucleic acid sequence.

The nucleobase components and the polynucleotide programmable nucleotide binding component of a base editor system may be associated with each other covalently or non-covalently. For example, in some embodiments, the deaminase domain can be targeted to a target nucleotide sequence by a polynucleotide programmable nucleotide binding domain. In some embodiments, a polynucleotide programmable nucleotide binding domain can be fused or linked to a deaminase domain. In some embodiments, a polynucleotide programmable nucleotide binding domain can target a deaminase domain to a target nucleotide sequence by non-covalently interacting with or associating with the deaminase domain. For example, in some embodiments, the nucleobase editing component, e.g., the deaminase component can comprise an additional heterologous portion or domain that is capable of interacting with, associating with, or capable of forming a complex with an additional heterologous portion or domain that is part of a polynucleotide programmable nucleotide binding domain. In some embodiments, the additional heterologous portion may be capable of binding to, interacting with, associating with, or forming a complex with a polypeptide. In some embodiments, the additional heterologous portion may be capable of binding to, interacting with, associating with, or forming a complex with a polynucleotide. In some embodiments, the additional heterologous portion may be capable of binding to a guide polynucleotide. In some embodiments, the additional heterologous portion may be capable of binding to a polypeptide linker. In some embodiments, the additional heterologous portion may be capable of binding to a polynucleotide linker. The additional heterologous portion may be a protein domain. In some embodiments, the additional heterologous portion may be a K Homology (KH) domain, a MS2 coat protein domain, a PP7 coat protein domain, a SfMu Com coat protein domain, a steril alpha motif, a telomerase Ku binding motif and Ku protein, a telomerase Sm7 binding motif and Sm7 protein, or a RNA recognition motif.

[0561] A base editor system may further comprise a guide polynucleotide component. It should be appreciated that components of the base editor system may be associated with each other via covalent bonds, noncovalent interactions, or any combination of associations and interactions thereof. In some embodiments, a deaminase domain can be targeted to a target nucleotide sequence by a guide polynucleotide. For example, in some embodiments, the nucleobase editing component of the base editor system, e.g., the deaminase component, can comprise an additional heterologous portion or domain (e.g., polynucleotide binding domain such as an RNA or DNA binding protein) that is capable of interacting with, associating with, or capable of forming a complex with a portion or segment (e.g., a polynucleotide motif) of a guide polynucleotide. In some embodiments, the additional heterologous portion or domain (e.g., polynucleotide binding domain such as an RNA or DNA binding protein) can be fused or linked to the deaminase domain. In some embodiments, the additional heterologous portion may be capable of binding to, interacting with, associating with, or forming a complex with a polypeptide. In some embodiments, the additional heterologous portion may be capable of binding to, interacting with, associating with, or forming a complex with a polynucleotide. In some embodiments, the additional heterologous portion may be capable of binding to a guide polynucleotide. In some embodiments, the additional heterologous portion may be capable of binding to a polypeptide linker. In some embodiments, the additional heterologous portion may be capable of binding to a polynucleotide linker. The additional heterologous portion may be a protein domain. In some embodiments, the additional heterologous portion may be a K Homology (KH) domain, a MS2 coat protein domain, a PP7 coat protein domain, a SfMu Com coat protein domain, a sterile alpha motif, a telomerase Ku binding motif and Ku protein, a telomerase Sm7 binding motif and Sm7 protein, or a RNA recognition motif.

[0562] In some embodiments, a base editor system can further comprise an inhibitor of base excision repair (BER) component. It should be appreciated that components of the base editor system may be associated with each other via covalent bonds, noncovalent interactions, or any combination of associations and interactions thereof. The inhibitor of BER component may comprise a base excision repair inhibitor. In some embodiments, the inhibitor of base excision repair can be a uracil DNA glycosylase inhibitor (UGI). In some embodiments, the inhibitor of base excision repair can be an inosine base excision repair inhibitor. In some embodiments, the inhibitor of base excision repair can be targeted to the target nucleotide sequence by the polynucleotide programmable nucleotide binding domain. In some embodiments, a polynucleotide programmable nucleotide binding domain can be fused or linked to an inhibitor of base excision repair. In some embodiments, a polynucleotide programmable nucleotide binding domain can be fused or linked to a deaminase domain and an inhibitor of base excision repair. In some embodiments, a polynucleotide programmable nucleotide binding domain can target an inhibitor of base excision repair to a target nucleotide sequence by non-covalently interacting with or associating with the inhibitor of base excision repair. For example, in some embodiments, the inhibitor of base excision repair component can comprise an additional heterologous portion or domain that is capable of interacting with, associating with, or capable of forming a complex with an additional heterologous portion or domain that is part of a polynucleotide programmable nucleotide binding domain. In some embodiments, the inhibitor of base excision repair can be targeted to the target nucleotide sequence by the guide polynucleotide. For example, in some embodiments, the inhibitor of base excision repair can comprise an additional heterologous portion or domain (e.g., polynucleotide binding domain such as an RNA or DNA binding protein) that is capable of interacting with, associating with, or capable of forming a complex with a portion or segment (e.g., a polynucleotide motif) of a guide polynucleotide. In some embodiments, the additional heterologous portion or domain of the guide polynucleotide (e.g., polynucleotide binding domain such as an RNA or DNA binding protein) can be fused or linked to the inhibitor of base excision repair. In some embodiments, the additional heterologous portion may be capable of binding to, interacting with, associating with, or forming a complex with a polynucleotide. In some embodiments, the additional heterologous portion may be capable of binding to a guide polynucleotide. In some embodiments, the additional heterologous portion may be capable of binding to a polypeptide linker. In some embodiments, the additional heterologous portion may be capable of binding to a polynucleotide linker. The additional heterologous portion may be a protein domain. In some embodiments, the additional heterologous portion may be a K Homology (KH) domain, a MS2 coat protein domain, a PP7 coat protein domain, a SfMu Com coat protein domain, a sterile alpha motif, a telomerase Ku binding motif and Ku protein, a telomerase Sm7 binding motif and Sm7 protein, or a RNA recognition motif.

[0563] In some embodiments, the base editor inhibits base excision repair (BER) of the edited strand. In some embodiments, the base editor protects or binds the non-edited strand. In some embodiments, the base editor comprises UGI activity. In some embodiments, the base editor comprises a catalytically inactive inosine-specific nuclease. In some embodiments, the base editor comprises nickase activity. In some embodiments, the intended edit of base pair is upstream of a PAM site. In some embodiments, the intended edit of base pair is 1, 2, 3, 4, 5, 6, 7, 8, 9, 10, 11, 12, 13, 14, 15, 16, 17, 18, 19, or 20 nucleotides upstream of the PAM site. In some embodiments, the intended edit of base-pair is downstream of a PAM site. In some embodiments, the intended edited base pair is 1, 2, 3, 4, 5, 6, 7, 8, 9, 10, 11, 12, 13, 14, 15, 16, 17, 18, 19, or 20 nucleotides downstream stream of the PAM site.

[0564] In some embodiments, the method does not require a canonical (e.g., NGG) PAM site. In some embodiments, the nucleobase editor comprises a linker or a spacer. In some embodiments, the linker or spacer is 1-25 amino acids in length. In some embodiments, the linker or spacer is 5-20 amino acids in length. In some embodiments, the linker or spacer is 10, 11, 12, 13, 14, 15, 16, 17, 18, 19, or 20 amino acids in length.

[0565] In some embodiments, the base editing fusion proteins provided herein need to be positioned at a precise location, for example, where a target base is placed within a defined region (e.g., a “deamination window”). In some embodiments, a target can be within a 4 base region. In some embodiments, such a defined target region can be approximately 15 bases upstream of the PAM. See Komor, A. C., et al., “Programmable editing of a target base in genomic DNA without double-stranded DNA cleavage” Nature 533, 420-424 (2016); Gaudelli, N. M., et al., “Programmable base editing of A•T to G•C in genomic DNA without DNA cleavage” Nature 551, 464-471 (2017); and Komor, A. C., et al., “Improved base excision repair inhibition and bacteriophage Mu Gam protein yields C:G-to-T:A base editors with higher efficiency and product purity” Science Advances 3:eaao4774 (2017), the entire contents of which are hereby incorporated by reference.

[0566] In some embodiments, the target region comprises a target window, wherein the target window comprises the target nucleobase pair. In some embodiments, the target window comprises 1-10 nucleotides. In some embodiments, the target window is 1, 2, 3, 4, 5, 6, 7, 8, 9, 10, 11, 12, 13, 14, 15, 16, 17, 18, 19, or 20 nucleotides in length. In some embodiments, the intended edit of base pair is within the target window. In some embodiments, the target window comprises the intended edit of base pair. In some embodiments, the method is performed using any of the base editors provided herein. In some embodiments, a target window is a deamination window. A deamination window can be the defined region in which a base editor acts upon and deaminates a target nucleotide. In some embodiments, the deamination window is within a 2, 3, 4, 5, 6, 7, 8, 9, or 10 base regions. In some embodiments, the deamination window is 5, 6, 7, 8, 9, 10, 11, 12, 13, 14, 15, 16, 17, 18, 19, 20, 21, 22, 23, 24, or 25 bases upstream of the PAM.

[0567] The base editors of the present disclosure can comprise any domain, feature or amino acid sequence which facilitates the editing of a target polynucleotide sequence. For example, in some embodiments, the base editor comprises a nuclear localization sequence (NLS). In some embodiments, an NLS of the base editor is localized between a deaminase domain and a polynucleotide programmable nucleotide binding domain. In some embodiments, an NLS of the base editor is localized C-terminal to a polynucleotide programmable nucleotide binding domain.

[0568] Other exemplary features that can be present in a base editor as disclosed herein are localization sequences, such as cytoplasmic localization sequences, export sequences, such as nuclear export sequences, or other localization sequences, as well as sequence tags that are useful for solubilization, purification, or detection of the fusion proteins. Suitable protein tags provided herein include, but are not limited to, biotin carboxylase carrier protein (BCCP) tags, myc-tags, calmodulin-tags, FLAG-tags, hemagglutinin (HA)-tags, polyhistidine tags, also referred to as histidine tags or His-tags, maltose binding protein (MBP)-tags, nus-tags, glutathione-S-transferase (GST)-tags, green fluorescent protein (GFP)-tags, thioredoxin-tags, S-tags, Softags (e.g., Softag 1, Softag 3), strep-tags, biotin ligase tags, FlAsH tags, V5 tags, and SBP-tags. Additional suitable sequences will be apparent to those of skill in the art. In some embodiments, the fusion protein comprises one or more His tags.

[0569] Non-limiting examples of protein domains which can be included in the fusion protein include deaminase domains (e.g., adenosine deaminase), a uracil glycosylase inhibitor (UGI) domain, epitope tags, and reporter gene sequences.

[0570] Non-limiting examples of epitope tags include histidine (His) tags, V5 tags, FLAG tags, influenza hemagglutinin (HA) tags, Myc tags, VSV-G tags, and thioredoxin (Trx) tags. Examples of reporter genes include, but are not limited to, glutathione-5-transferase (GST), horseradish peroxidase (HRP), chloramphenicol acetyltransferase (CAT) beta-galactosidase, beta-glucuronidase, luciferase, green fluorescent protein (GFP), HcRed, DsRed, cyan fluorescent protein (CFP), yellow fluorescent protein (YFP), and autofluorescent proteins including blue fluorescent protein (BFP). Additional protein sequences can include amino acid sequences that bind DNA molecules or bind other cellular molecules, including, but not limited to, maltose binding protein (MBP), S-tag, Lex A DNA binding domain (DBD) fusions, GAL4 DNA binding domain fusions, and herpes simplex virus (HSV) BP16 protein fusions.

[0571] In some embodiments, the adenosine base editor (ABE) can deaminate adenine in DNA. In some embodiments, ABE is generated by replacing APOBEC1 component of BE3 with natural or engineered E. coli TadA, human ADAR2, mouse ADA, or human ADAT2. In some embodiments, ABE comprises evolved TadA variant. In some embodiments, the ABE is ABE 1.2 (TadA*-XTEN-nCas9-NLS). In some embodiments, TadA* comprises A106V and D108N mutations.

[0572] In some embodiments, the ABE is a second-generation ABE. In some embodiments, the ABE is ABE2.1, which comprises additional mutations D147Y and E155V in TadA* (TadA*2.1). In some embodiments, the ABE is ABE2.2, ABE2.1 fused to catalytically inactivated version of human alkyl adenine DNA glycosylase (AAG with E125Q mutation). In some embodiments, the ABE is ABE2.3, ABE2.1 fused to catalytically inactivated version of E. coli Endo V (inactivated with D35A mutation). In some embodiments, the ABE is ABE2.6 which has a linker twice as long (32 amino acids, (SGGS)2-XTEN-(SGGS)2) as the linker in ABE2.1. In some embodiments, the ABE is ABE2.7, which is ABE2.1 tethered with an additional wild-type TadA monomer. In some embodiments, the ABE is ABE2.8, which is ABE2.1 tethered with an additional TadA*2.1 monomer. In some embodiments, the ABE is ABE2.9, which is a direct fusion of evolved TadA (TadA*2.1) to the N-terminus of ABE2.1. In some embodiments, the ABE is ABE2.10, which is a direct fusion of wild-type TadA to the N-terminus of ABE2.1. In some embodiments, the ABE is ABE2.11, which is ABE2.9 with an inactivating E59A mutation at the N-terminus of TadA* monomer. In some embodiments, the ABE is ABE2.12, which is ABE2.9 with an inactivating E59A mutation in the internal TadA* monomer.

[0573] In some embodiments, the ABE is a third generation ABE. In some embodiments, the ABE is ABE3.1, which is ABE2.3 with three additional TadA mutations (L84F, H123Y, and I156F).

[0574] In some embodiments, the ABE is a fourth generation ABE. In some embodiments, the ABE is ABE4.3, which is ABE3.1 with an additional TadA mutation A142N (TadA*4.3).

[0575] In some embodiments, the ABE is a fifth generation ABE. In some embodiments, the ABE is ABE5.1, which is generated by importing a consensus set of mutations from surviving clones (H36L, R51L, S146C, and K157N) into ABE3.1. In some embodiments, the ABE is ABE5.3, which has a heterodimeric construct containing wild-type E. coli TadA fused to an internal evolved TadA*. In some embodiments, the ABE is ABE5.2, ABE5.4, ABE5.5, ABE5.6, ABE5.7, ABE5.8, ABE5.9, ABE5.10, ABE5.11, ABE5.12, ABE5.13, or ABE5.14, as shown in below Table 6. In some embodiments, the ABE is a sixth generation ABE. In some embodiments, the ABE is ABE6.1, ABE6.2, ABE6.3, ABE6.4, ABE6.5, or ABE6.6, as shown in below Table 6. In some embodiments, the ABE is a seventh generation ABE. In some embodiments, the ABE is ABE7.1, ABE7.2, ABE7.3, ABE7.4, ABE7.5, ABE7.6, ABE7.7, ABE7.8, ABE 7.9, or ABE7.10, as shown in Table 6 below.

TABLE 6
Genotypes of ABEs

| | 23 | 26 | 36 | 37 | 48 | 49 | 51 | 72 | 84 | 87 | 105 | 108 | 123 | 125 | 142 | 145 | 147 | 152 | 155 | 156 | 157 | 161 |
|---|---|---|---|---|---|---|---|---|---|---|---|---|---|---|---|---|---|---|---|---|---|---|
| ABE0.1 | W | R | H | N | P | | R | N | L | S | A | D | H | G | A | S | D | R | E | I | K | K |
| ABE0.2 | W | R | H | N | P | | R | N | L | S | A | D | H | G | A | S | D | R | E | I | K | K |
| ABE1.1 | W | R | H | N | P | | R | N | L | S | A | N | H | G | A | S | D | R | E | I | K | K |
| ABE1.2 | W | R | H | N | P | | R | N | L | S | V | N | H | G | A | S | D | R | E | I | K | K |
| ABE2.1 | W | R | H | N | P | | R | N | L | S | V | N | H | G | A | S | Y | R | V | I | K | K |
| ABE2.2 | W | R | H | N | P | | R | N | L | S | V | N | H | G | A | S | Y | R | V | I | K | K |
| ABE2.3 | W | R | H | N | P | | R | N | L | S | V | N | H | G | A | S | Y | R | V | I | K | K |
| ABE2.4 | W | R | H | N | P | | R | N | L | S | V | N | H | G | A | S | Y | R | V | I | K | K |
| ABE2.5 | W | R | H | N | P | | R | N | L | S | V | N | H | G | A | S | Y | R | V | I | K | K |
| ABE2.6 | W | R | H | N | P | | R | N | L | S | V | N | H | G | A | S | Y | R | V | I | K | K |
| ABE2.7 | W | R | H | N | P | | R | N | L | S | V | N | H | G | A | S | Y | R | V | I | K | K |
| ABE2.8 | W | R | H | N | P | | R | N | L | S | V | N | H | G | A | S | Y | R | V | I | K | K |
| ABE2.9 | W | R | H | N | P | | R | N | L | S | V | N | H | G | A | S | Y | R | V | I | K | K |
| ABE2.10 | W | R | H | N | P | | R | N | L | S | V | N | H | G | A | S | Y | R | V | I | K | K |
| ABE2.11 | W | R | H | N | P | | R | N | L | S | V | N | H | G | A | S | Y | R | V | I | K | K |
| ABE2.12 | W | R | H | N | P | | R | N | L | S | V | N | H | G | A | S | Y | R | V | I | K | K |
| ABE3.1 | W | R | H | N | P | | R | N | F | S | V | N | Y | G | A | S | Y | R | V | F | K | K |
| ABE3.2 | W | R | H | N | P | | R | N | F | S | V | N | Y | G | A | S | Y | R | V | F | K | K |
| ABE3.3 | W | R | H | N | P | | R | N | F | S | V | N | Y | G | A | S | Y | R | V | F | K | K |
| ABE3.4 | W | R | H | N | P | | R | N | F | S | V | N | Y | G | A | S | Y | R | V | F | K | K |
| ABE3.5 | W | R | H | N | P | | R | N | F | S | V | N | Y | G | A | S | Y | R | V | F | K | K |
| ABE3.6 | W | R | H | N | P | | R | N | F | S | V | N | Y | G | A | S | Y | R | V | F | K | K |
| ABE3.7 | W | R | H | N | P | | R | N | F | S | V | N | Y | G | A | S | Y | R | V | F | K | K |
| ABE3.8 | W | R | H | N | P | | R | N | F | S | V | N | Y | G | A | S | Y | R | V | F | K | K |
| ABE4.1 | W | R | H | N | P | | R | N | L | S | V | N | H | G | N | S | Y | R | V | I | K | K |
| ABE4.2 | W | G | H | N | P | | R | N | L | S | V | N | H | G | N | S | Y | R | V | I | K | K |
| ABE4.3 | W | R | H | N | P | | R | N | F | S | V | N | Y | G | N | S | Y | R | V | F | K | K |
| ABE5.1 | W | R | L | N | P | | L | N | F | S | V | N | Y | G | A | C | Y | R | V | F | N | K |
| ABE5.2 | W | R | H | S | P | | R | N | F | S | V | N | Y | G | A | S | Y | R | V | F | K | T |
| ABE5.3 | W | R | L | N | P | | L | N | I | S | V | N | Y | G | A | C | Y | R | V | I | N | K |
| ABE5.4 | W | R | H | S | P | | R | N | F | S | V | N | Y | G | A | S | Y | R | V | F | K | T |
| ABE5.5 | W | R | L | N | P | | L | N | F | S | V | N | Y | G | A | C | Y | R | V | F | N | K |
| ABE5.6 | W | R | L | N | P | | L | N | F | S | V | N | Y | G | A | C | Y | R | V | F | N | K |
| ABE5.7 | W | R | L | N | P | | L | N | F | S | V | N | Y | G | A | C | Y | R | V | F | N | K |
| ABE5.8 | W | R | L | N | P | | L | N | F | S | V | N | Y | G | A | C | Y | R | V | F | N | K |
| ABE5.9 | W | R | L | N | P | | L | N | F | S | V | N | Y | G | A | C | Y | R | V | F | N | K |
| ABE5.10 | W | R | L | N | P | | L | N | F | S | V | N | Y | G | A | C | Y | R | V | F | N | K |
| ABE5.11 | W | R | L | N | P | | L | N | F | S | V | N | Y | G | A | C | Y | R | V | F | N | K |
| ABE5.12 | W | R | L | N | P | | L | N | F | S | V | N | Y | G | A | C | Y | R | V | F | N | K |
| ABE5.13 | W | R | H | N | P | | L | D | F | S | V | N | Y | A | A | S | Y | R | V | F | K | K |
| ABE5.14 | W | R | H | N | S | | L | N | F | C | V | N | Y | G | A | S | Y | R | V | F | K | K |
| ABE6.1 | W | R | H | N | S | | L | N | F | S | V | N | Y | G | N | S | Y | R | V | F | K | K |
| ABE6.2 | W | R | H | N | T | V | L | N | F | S | V | N | Y | G | N | S | Y | R | V | F | N | K |
| ABE6.3 | W | R | L | N | S | | L | N | F | S | V | N | Y | G | A | C | Y | R | V | F | N | K |
| ABE6.4 | W | R | L | N | S | | L | N | F | S | V | N | Y | G | N | C | Y | R | V | F | N | K |
| ABE6.5 | W | R | L | N | I | V | L | N | F | S | V | N | Y | G | A | C | Y | R | V | F | N | K |
| ABE6.6 | W | R | L | N | T | V | L | N | F | S | V | N | Y | G | N | C | Y | R | V | F | N | K |
| ABE7.1 | W | R | L | N | A | | L | N | F | S | V | N | Y | G | A | C | Y | R | V | F | N | K |
| ABE7.2 | W | R | L | N | A | | L | N | F | S | V | N | Y | G | N | C | Y | R | V | F | N | K |
| ABE7.3 | I | R | L | N | A | | L | N | F | S | V | N | Y | G | A | C | Y | R | V | F | N | K |
| ABE7.4 | R | R | L | N | A | | L | N | F | S | V | N | Y | G | A | C | Y | R | V | F | N | K |
| ABE7.5 | W | R | L | N | A | | L | N | F | S | V | N | Y | G | A | C | Y | H | V | F | N | K |
| ABE7.6 | W | R | L | N | A | | L | N | I | S | V | N | Y | G | A | C | Y | P | V | I | N | K |
| ABE7.7 | L | R | L | N | A | | L | N | F | S | V | N | Y | G | A | C | Y | P | V | F | N | K |
| ABE7.8 | I | R | L | N | A | | L | N | F | S | V | N | Y | G | N | C | Y | R | V | F | N | K |
| ABE7.9 | L | R | L | N | A | | L | N | F | S | V | N | Y | G | N | C | Y | P | V | F | N | K |
| ABE7.10 | R | R | L | N | A | | L | N | F | S | V | N | Y | G | A | C | Y | P | V | F | N | K |

[0576] In some embodiments, the base editor is an eighth generation ABE (ABE8). In some embodiments, the ABE8 contains a TadA*8 variant. In some embodiments, the ABE8 has a monomeric construct containing a TadA*8 variant (“ABE8.x-m”). In some embodiments, the ABE8 is ABE8.1-m, which has a monomeric construct containing TadA*7.10 with a Y147T mutation (TadA*8.1). In some embodiments, the ABE8 is ABE8.2-m, which has a monomeric construct containing TadA*7.10 with a Y147R mutation (TadA*8.2). In some embodiments, the ABE8 is ABE8.3-m, which has a monomeric construct containing TadA*7.10 with a Q154S mutation (TadA*8.3). In some embodiments, the ABE8 is ABE8.4-m, which has a monomeric construct containing TadA*7.10 with a Y123H mutation (TadA*8.4). In some embodiments, the ABE8 is ABE8.5-m, which has a monomeric construct containing TadA*7.10 with a V82S mutation (TadA*8.5). In some embodiments, the ABE8 is ABE8.6-m, which has a monomeric construct containing TadA*7.10 with a T166R mutation (TadA*8.6). In some embodiments, the ABE8 is ABE8.7-m, which has a monomeric construct containing TadA*7.10 with a Q154R mutation (TadA*8.7). In some embodiments, the ABE8 is ABE8.8-m, which has a monomeric construct containing TadA*7.10 with Y147R, Q154R, and Y123H mutations (TadA*8.8). In some embodiments, the ABE8 is ABE8.9-m, which has a monomeric construct containing TadA*7.10 with Y147R, Q154R and I76Y mutations (TadA*8.9). In some embodiments, the ABE8 is ABE8.10-m, which has a monomeric construct containing TadA*7.10 with Y147R, Q154R, and T166R mutations (TadA*8.10). In some embodiments, the ABE8 is ABE8.11-m, which has a monomeric construct containing TadA*7.10 with Y147T and Q154R mutations (TadA*8.11). In some embodiments, the ABE8 is ABE8.12-m, which has a monomeric construct containing TadA*7.10 with Y147T and Q154S mutations (TadA*8.12). In some embodiments, the ABE8 is ABE8.13-m, which has a monomeric construct containing TadA*7.10 with Y123H (Y123H reverted from H123Y), Y147R, Q154R and I76Y mutations (TadA*8.13). In some embodiments, the ABE8 is ABE8.14-m, which has a monomeric construct containing TadA*7.10 with I76Y and V82S mutations (TadA*8.14). In some embodiments, the ABE8 is ABE8.15-m, which has a monomeric construct containing TadA*7.10 with V82S and Y147R mutations (TadA*8.15). In some embodiments, the ABE8 is ABE8.16-m, which has a monomeric construct containing TadA*7.10 with V82S, Y123H (Y123H reverted from H123Y) and Y147R mutations (TadA*8.16). In some embodiments, the ABE8 is ABE8.17-m, which has a monomeric construct containing TadA*7.10 with V82S and Q154R mutations (TadA*8.17). In some embodiments, the ABE8 is ABE8.18-m, which has a monomeric construct containing TadA*7.10 with V82S, Y123H (Y123H reverted from H123Y) and Q154R mutations (TadA*8.18). In some embodiments, the ABE8 is ABE8.19-m, which has a monomeric construct containing TadA*7.10 with V82S, Y123H (Y123H reverted from H123Y), Y147R and Q154R mutations (TadA*8.19). In some embodiments, the ABE8 is ABE8.20-m, which has a monomeric construct containing TadA*7.10 with I76Y, V82S, Y123H (Y123H reverted from H123Y), Y147R and Q154R mutations (TadA*8.20). In some embodiments, the ABE8 is ABE8.21-m, which has a monomeric construct containing TadA*7.10 with Y147R and Q154S mutations (TadA*8.21). In some embodiments, the ABE8 is ABE8.22-m, which has a monomeric construct containing TadA*7.10 with V82S and Q154S mutations (TadA*8.22). In some embodiments, the ABE8 is ABE8.23-m, which has a monomeric construct containing TadA*7.10 with V82S and Y123H (Y123H reverted from H123Y) mutations (TadA*8.23). In some embodiments, the ABE8 is ABE8.24-m, which has a monomeric construct containing TadA*7.10 with V82S, Y123H (Y123H reverted from H123Y), and Y147T mutations (TadA*8.24).

[0577] In some embodiments, the ABE8 has a heterodimeric construct containing wild-type E. coli TadA fused to a TadA*8 variant (“ABE8.x-d”). In some embodiments, the ABE8 is ABE8.1-d, which has a heterodimeric construct containing wild-type E. coli TadA fused to TadA*7.10 with a Y147T mutation (TadA*8.1). In some embodiments, the ABE8 is ABE8.2-d, which has a heterodimeric construct containing wild-type E. coli TadA fused to TadA*7.10 with a Y147R mutation (TadA*8.2). In some embodiments, the ABE8 is ABE8.3-d, which has a heterodimeric construct containing wild-type E. coli TadA fused to TadA*7.10 with a Q154S mutation (TadA*8.3). In some embodiments, the ABE8 is ABE8.4-d, which has a heterodimeric construct containing wild-type E. coli TadA fused to TadA*7.10 with a Y123H mutation (TadA*8.4). In some embodiments, the ABE8 is ABE8.5-d, which has a heterodimeric construct containing wild-type E. coli TadA fused to TadA*7.10 with a V82S mutation (TadA*8.5). In some embodiments, the ABE8 is ABE8.6-d, which has a heterodimeric construct containing wild-type E. coli TadA fused to TadA*7.10 with a T166R mutation (TadA*8.6). In some embodiments, the ABE8 is ABE8.?-d, which has a heterodimeric construct containing wild-type E. coli TadA fused to TadA*7.10 with a Q154R mutation (TadA*8.7). In some embodiments, the ABE8 is ABE8.8-d, which has a heterodimeric construct containing wild-type E. coli TadA fused to TadA*7.10 with Y147R, Q154R, and Y123H mutations (TadA*8.8). In some embodiments, the ABE8 is ABE8.9-d, which has a heterodimeric construct containing wild-type E. coli TadA fused to TadA*7.10 with Y147R, Q154R and I76Y mutations (TadA*8.9). In some embodiments, the ABE8 is ABE8.10-d, which has a heterodimeric construct containing wild-type E. coli TadA fused to TadA*7.10 with Y147R, Q154R, and T166R mutations (TadA*8.10). In some embodiments, the ABE8 is ABE8.11-d, which has a heterodimeric construct containing wild-type E. coli TadA fused to TadA*7.10 with Y147T and Q154R mutations (TadA*8.11). In some embodiments, the ABE8 is ABE8.12-d, which has heterodimeric construct containing wild-type E. coli TadA fused to TadA*7.10 with Y147T and Q154S mutations (TadA*8.12). In some embodiments, the ABE8 is ABE8.13-d, which has a heterodimeric construct containing wild-type E. coli TadA fused to TadA*7.10 with Y123H (Y123H reverted from H123Y), Y147R, Q154R and I76Y mutations (TadA*8.13). In some embodiments, the ABE8 is ABE8.14-d, which has a heterodimeric construct containing wild-type E. coli TadA fused to TadA*7.10 with I76Y and V82S mutations (TadA*8.14). In some embodiments, the ABE8 is ABE8.15-d, which has a heterodimeric construct containing wild-type E. coli TadA fused to TadA*7.10 with V82S and Y147R mutations (TadA*8.15). In some embodiments, the ABE8 is ABE8.16-d, which has a heterodimeric construct containing wild-type E. coli TadA fused to TadA*7.10 with V82S, Y123H (Y123H reverted from H123Y) and Y147R mutations (TadA*8.16). In some embodiments, the ABE8 is ABE8.17-d, which has a heterodimeric construct containing wild-type E. coli TadA fused to TadA*7.10 with V82S and Q154R mutations (TadA*8.17). In some embodiments, the ABE8 is ABE8.18-d, which has a heterodimeric construct containing wild-type E. coli TadA fused to TadA*7.10 with V82S, Y123H (Y123H reverted from H123Y) and Q154R mutations (TadA*8.18). In some embodiments, the ABE8 is ABE8.19-d, which has a heterodimeric construct containing wild-type E. coli TadA fused to TadA*7.10 with V82S, Y123H (Y123H reverted from H123Y), Y147R and Q154R mutations (TadA*8.19). In some embodiments, the ABE8 is ABE8.20-d, which has a heterodimeric construct containing wild-type E. coli TadA fused to TadA*7.10 with I76Y, V82S, Y123H (Y123H reverted from H123Y), Y147R and Q154R mutations (TadA*8.20). In some embodiments, the ABE8 is ABE8.21-d, which has a heterodimeric construct containing wild-type E. coli TadA fused to TadA*7.10 with Y147R and Q154S mutations (TadA*8.21). In some embodiments, the ABE8 is ABE8.22-d, which has a heterodimeric construct containing wild-type E. coli TadA fused to TadA*7.10 with V82S and Q154S mutations (TadA*8.22). In some embodiments, the ABE8 is ABE8.23-d, which has a heterodimeric construct containing wild-type E. coli TadA fused to TadA*7.10 with V82S and Y123H (Y123H reverted from H123Y) mutations (TadA*8.23). In some embodiments, the ABE8 is ABE8.24-d, which has a heterodimeric construct containing wild-type E. coli TadA fused to TadA*7.10 with V82S, Y123H (Y123H reverted from H123Y), and Y147T mutations (TadA*8.24).

[0578] In some embodiments, the ABE8 has a heterodimeric construct containing TadA*7.10 fused to a TadA*8 variant (“ABE8.x-7”). In some embodiments, the ABE8 is ABE8.1-7, which has a heterodimeric construct containing TadA*7.10 fused to TadA*7.10 with a Y147T mutation (TadA*8.1). In some embodiments, the ABE8 is ABE8.2-7, which has a heterodimeric construct containing TadA*7.10 fused to TadA*7.10 with a Y147R mutation (TadA*8.2). In some embodiments, the ABE8 is ABE8.3-7, which has a heterodimeric construct containing TadA*7.10 fused to TadA*7.10 with a Q154S mutation (TadA*8.3). In some embodiments, the ABE8 is ABE8.4-7, which has a heterodimeric construct containing TadA*7.10 fused to TadA*7.10 with a Y123H mutation (TadA*8.4). In some embodiments, the ABE8 is ABE8.5-7, which has a heterodimeric construct containing TadA*7.10 fused to TadA*7.10 with a V82S mutation (TadA*8.5). In some embodiments, the ABE8 is ABE8.6-7, which has a heterodimeric construct containing TadA*7.10 fused to TadA*7.10 with a T166R mutation (TadA*8.6). In some embodiments, the ABE8 is ABE8.7-7, which has a heterodimeric construct containing TadA*7.10 fused to TadA*7.10 with a Q154R mutation (TadA*8.7). In some embodiments, the ABE8 is ABE8.8-7, which has a heterodimeric construct containing TadA*7.10 fused to TadA*7.10 with Y147R, Q154R, and Y123H mutations (TadA*8.8). In some embodiments, the ABE8 is ABE8.9-7, which has a heterodimeric construct containing TadA*7.10 fused to TadA*7.10 with Y147R, Q154R and I76Y mutations (TadA*8.9). In some embodiments, the ABE8 is ABE8.10-7, which has a heterodimeric construct containing TadA*7.10 fused to TadA*7.10 with Y147R, Q154R, and T166R mutations (TadA*8.10). In some embodiments, the ABE8 is ABE8.11-7, which has a heterodimeric construct containing TadA*7.10 fused to TadA*7.10 with Y147T and Q154R mutations (TadA*8.11). In some embodiments, the ABE8 is ABE8.12-7, which has a heterodimeric construct containing TadA*7.10 fused to TadA*7.10 with Y147T and Q154S mutations (TadA*8.12). In some embodiments, the ABE8 is ABE8.13-7, which has a heterodimeric construct containing TadA*7.10 fused to TadA*7.10 with Y123H (Y123H reverted from H123Y), Y147R, Q154R and I76Y mutations (TadA*8.13). In some embodiments, the ABE8 is ABE8.14-7, which has a heterodimeric construct containing TadA*7.10 fused to TadA*7.10 with I76Y and V82S mutations (TadA*8.14). In some embodiments, the ABE8 is ABE8.15-7, which has a heterodimeric construct containing TadA*7.10 fused to TadA*7.10 with V82S and Y147R mutations (TadA*8.15). In some embodiments, the ABE8 is ABE8.16-7, which has a heterodimeric construct containing TadA*7.10 fused to TadA*7.10 with V82S, Y123H (Y123H reverted from H123Y) and Y147R mutations (TadA*8.16). In some embodiments, the ABE8 is ABE8.17-7, which has a heterodimeric construct containing TadA*7.10 fused to TadA*7.10 with V82S and Q154R mutations (TadA*8.17). In some embodiments, the ABE8 is ABE8.18-7, which has a heterodimeric construct containing TadA*7.10 fused to TadA*7.10 with V82S, Y123H (Y123H reverted from H123Y) and Q154R mutations (TadA*8.18). In some embodiments, the ABE8 is ABE8.19-7, which has a heterodimeric construct containing TadA*7.10 fused to TadA*7.10 with V82S, Y123H (Y123H reverted from H123Y), Y147R and Q154R mutations (TadA*8.19). In some embodiments, the ABE8 is ABE8.20-7, which has a heterodimeric construct containing TadA*7.10 fused to TadA*7.10 with I76Y, V82S, Y123H (Y123H reverted from H123Y), Y147R and Q154R mutations (TadA*8.20). In some embodiments, the ABE8 is ABE8.21-7, which has a heterodimeric construct containing TadA*7.10 fused to TadA*7.10 with Y147R and Q154S mutations (TadA*8.21). In some embodiments, the ABE8 is ABE8.22-7, which has a heterodimeric construct containing TadA*7.10 fused to TadA*7.10 with V82S and Q154S mutations (TadA*8.22). In some embodiments, the ABE8 is ABE8.23-7, which has a heterodimeric construct containing TadA*7.10 fused to TadA*7.10 with V82S and Y123H (Y123H reverted from H123Y) mutations (TadA*8.23). In some embodiments, the ABE8 is ABE8.24-7, which has a heterodimeric construct containing TadA*7.10 fused to TadA*7.10 with V82S, Y123H (Y123H reverted from H123Y), and Y147T mutations (TadA*8.24).

[0579] In some embodiments, the ABE is ABE8.1-m, ABE8.2-m, ABE8.3-m, ABE8.4-m, ABE8.5-m, ABE8.6-m, ABE8.7-m, ABE8.8-m, ABE8.9-m, ABE8.10-m, ABE8.11-m, ABE8.12-m, ABE8.13-m, ABE8.14-m, ABE8.15-m, ABE8.16-m, ABE8.17-m, ABE8.18-m, ABE8.19-m, ABE8.20-m, ABE8.21-m, ABE8.22-m, ABE8.23-m, ABE8.24-m, ABE8.1-d, ABE8.2-d, ABE8.3-d, ABE8.4-d, ABE8.5-d, ABE8.6-d, ABE8.7-d, ABE8.8-d, ABE8.9-d, ABE8.10-d, ABE8.11-d, ABE8.12-d, ABE8.13-d, ABE8.14-d, ABE8.15-d, ABE8.16-d, ABE8.17-d, ABE8.18-d, ABE8.19-d, ABE8.20-d, ABE8.21-d, ABE8.22-d, ABE8.23-d, or ABE8.24-d as shown in Table 7 below.

TABLE 7
Adenosine Deaminase Base Editor 8 (ABE8)

| | Adenosine | |
|---|---|---|
| ABE8 | Deaminase | Adenosine Deaminase Description |
| ABE8.1-m | TadA*8.1 | Monomer_TadA*7.10 + Y147T |
| ABE8.2-m | TadA*8.2 | Monomer_TadA*7.10 + Y147R |
| ABE8.3-m | TadA*8.3 | Monomer_TadA*7.10 + Q154S |
| ABE8.4-m | TadA*8.4 | Monomer_TadA*7.10 + Y123H |
| ABE8.5-m | TadA*8.5 | Monomer_TadA*7.10 + V82S |
| ABE8.6-m | TadA*8.6 | Monomer_TadA*7.10 + T166R |
| ABE8.7-m | TadA*8.7 | Monomer_TadA*7.10 + Q154R |
| ABE8.8-m | TadA*8.8 | Monomer_TadA*7.10 + Y147R_Q154R_Y123H |
| ABE8.9-m | TadA*8.9 | Monomer_TadA*7.10 + Y147R_Q154R_I76Y |
| ABE8.10-m | TadA*8.10 | Monomer_TadA*7.10 + Y147R_Q154R_T166R |
| ABE8.11-m | TadA*8.11 | Monomer_TadA*7.10 + Y147T_Q154R |
| ABE8.12-m | TadA*8.12 | Monomer_TadA*7.10 + Y147T_Q154S |
| ABE8.13-m | TadA*8.13 | Monomer_TadA*7.10 + Y123H_Y147R_Q154R_I76Y |
| ABE8.14-m | TadA*8.14 | Monomer_TadA*7.10 + I76Y_V82S |
| ABE8.15-m | TadA*8.15 | Monomer_TadA*7.10 + V82S_Y147R |
| ABE8.16-m | TadA*8.16 | Monomer_TadA*7.10 + V82S_Y123H_Y147R |
| ABE8.17-m | TadA*8.17 | Monomer_TadA*7.10 + V82S_Q154R |
| ABE8.18-m | TadA*8.18 | Monomer_TadA*7.10 + V82S_Y123H_Q154R |
| ABE8.19-m | TadA*8.19 | Monomer_TadA*7.10 + V82S_Y123H_Y147R_Q154R |
| ABE8.20-m | TadA*8.20 | Monomer_TadA*7.10 + I76Y_V82S_Y123H_Y147R_Q154R |
| ABE8.21-m | TadA*8.21 | Monomer_TadA*7.10 + Y147R_Q154S |
| ABE8.22-m | TadA*8.22 | Monomer_TadA*7.10 + V82S_Q154S |
| ABE8.23-m | TadA*8.23 | Monomer_TadA*7.10 + V82S_Y123H |
| ABE8.24-m | TadA*8.24 | Monomer_TadA*7.10 + V82S_Y123H_Y147T |
| ABE8.1-d | TadA*8.1 | Heterodimer_(WT) + (TadA*7.10 + Y147T) |
| ABE8.2-d | TadA*8.2 | Heterodimer_(WT) + (TadA*7.10 + Y147R) |
| ABE8.3-d | TadA*8.3 | Heterodimer_(WT) + (TadA*7.10 + Q154S) |
| ABE8.4-d | TadA*8.4 | Heterodimer_(WT) + (TadA*7.10 + Y123H) |
| ABE8.5-d | TadA*8.5 | Heterodimer_(WT) + (TadA*7.10 + V82S) |
| ABE8.6-d | TadA*8.6 | Heterodimer_(WT) + (TadA*7.10 + T166R) |
| ABE8.7-d | TadA*8.7 | Heterodimer_(WT) + (TadA*7.10 + Q154R) |
| ABE8.8-d | TadA*8.8 | Heterodimer_(WT) + (TadA*7.10 + Y147R_Q154R_Y123H) |
| ABE8.9-d | TadA*8.9 | Heterodimer_(WT) + (TadA*7.10 + Y147R_Q154R_I76Y) |
| ABE8.10-d | TadA*8.10 | Heterodimer_(WT) + (TadA*7.10 + Y147R_Q154R_T166R) |
| ABE8.11-d | TadA*8.11 | Heterodimer_(WT) + (TadA*7.10 + Y147T_Q154R) |
| ABE8.12-d | TadA*8.12 | Heterodimer_(WT) + (TadA*7.10 + Y147T_Q154S) |
| ABE8.13-d | TadA*8.13 | Heterodimer_(WT) + (TadA*7.10 + Y123H_Y147T_Q154R_I76Y) |
| ABE8.14-d | TadA*8.14 | Heterodimer_(WT) + (TadA*7.10 + I76Y_V82S) |
| ABE8.15-d | TadA*8.15 | Heterodimer_(WT) + (TadA*7.10 + V82S_ Y147R) |
| ABE8.16-d | TadA*8.16 | Heterodimer_(WT) + (TadA*7.10 + V82S_Y123H_Y147R) |
| ABE8.17-d | TadA*8.17 | Heterodimer_(WT) + (TadA*7.10 + V82S_Q154R) |
| ABE8.18-d | TadA*8.18 | Heterodimer_(WT) + (TadA*7.10 + V82S_Y123H_Q154R) |
| ABE8.19-d | TadA*8.19 | Heterodimer_(WT) + (TadA*7.10 + V82S_Y123H_Y147R_Q154R) |
| ABE8.20-d | TadA*8.20 | Heterodimer_(WT) + (TadA*7.10 + I76Y_V82S_Y123H_Y147R_Q154R) |
| ABE8.21-d | TadA*8.21 | Heterodimer_(WT) + (TadA*7.10 + Y147R_Q154S) |
| ABE8.22-d | TadA*8.22 | Heterodimer_(WT) + (TadA*7.10 + V82S_Q154S) |
| ABE8.23-d | TadA*8.23 | Heterodimer_(WT) + (TadA*7.10 + V82S_Y123H) |
| ABE8.24-d | TadA*8.24 | Heterodimer_(WT) + (TadA*7.10 + V82S_Y123H_Y147T) |

[0580] In some embodiments, base editors (e.g., ABE8) are generated by cloning an adenosine deaminase variant (e.g., TadA*8) into a scaffold that includes a circular permutant Cas9 (e.g., CP5 or CP6) and a bipartite nuclear localization sequence. In some embodiments, the base editor (e.g., ABE7.9, ABE7.10, or ABE8) is an NGC PAM CP5 variant (S. pyrogenes Cas9 or spVRQR Cas9). In some embodiments, the base editor (e.g., ABE7.9, ABE7.10, or ABE8) is an AGA PAM CP5 variant (S. pyrogenes Cas9 or spVRQR Cas9). In some embodiments, the base editor (e.g., ABE7.9, ABE7.10, or ABE8) is an NGC PAM CP6 variant (S. pyrogenes Cas9 or spVRQR Cas9). In some embodiments, the base editor (e.g. ABE7.9, ABE7.10, or ABE8) is an AGA PAM CP6 variant (S. pyrogenes Cas9 or spVRQR Cas9).

[0581] In some embodiments, the ABE has a genotype as shown in Table 8 below.

TABLE 8
Genotypes of ABEs

| | 23 | 26 | 36 | 37 | 48 | 49 | 51 | 72 | 84 | 87 | 105 | 108 | 123 | 125 | 142 | 145 | 147 | 152 | 155 | 156 | 157 | 161 |
|---|---|---|---|---|---|---|---|---|---|---|---|---|---|---|---|---|---|---|---|---|---|---|
| ABE7.9 | L | R | L | N | A | | L | N | F | S | V | N | Y | G | N | C | Y | P | V | F | N | K |
| ABE7.10 | R | R | L | N | A | | L | N | F | S | V | N | Y | G | A | C | Y | P | V | F | N | K |

[0582] As shown in Table 9 below, genotypes of 40 ABE8s are described. Residue positions in the evolved E. coli TadA portion of ABE are indicated. Mutational changes in ABE8 are shown when distinct from ABE7.10 mutations. In some embodiments, the ABE has a genotype of one of the ABEs as shown in Table 9 below.

TABLE 9
Residue Identity in Evolved TadA

| | 23 | 36 | 48 | 51 | 76 | 82 | 84 | 106 | 108 | 123 | 146 | 147 | 152 | 154 | 155 | 156 | 157 | 166 |
|---|---|---|---|---|---|---|---|---|---|---|---|---|---|---|---|---|---|---|
| ABE7.10 | R | L | A | L | I | V | F | V | N | Y | C | Y | P | Q | V | F | N | T |
| ABE8.1-m | | | | | | | | | | | | T | | | | | | |
| ABE8.2-m | | | | | | | | | | | | R | | | | | | |
| ABE8.3-m | | | | | | | | | | | | | | S | | | | |
| ABE8.4-m | | | | | | | | | | H | | | | | | | | |
| ABE8.5-m | | | | | | S | | | | | | | | | | | | |
| ABE8.6-m | | | | | | | | | | | | | | | | | | R |
| ABE8.7-m | | | | | | | | | | | | | | R | | | | |
| ABE8.8-m | | | | | | | | | | H | | R | | R | | | | |
| ABE8.9-m | | | | | Y | | | | | | | R | | R | | | | |
| ABE8.10-m | | | | | | | | | | | | R | | R | | | | R |
| ABE8.11-m | | | | | | | | | | | | T | | R | | | | |
| ABE8.12-m | | | | | | | | | | | | T | | S | | | | |
| ABE8.13-m | | | | | Y | | | | | H | | R | | R | | | | |
| ABE8.14-m | | | | | Y | S | | | | | | | | | | | | |
| ABE8.15-m | | | | | | S | | | | | | R | | | | | | |
| ABE8.16-m | | | | | | S | | | | H | | R | | | | | | |
| ABE8.17-m | | | | | | S | | | | | | | | R | | | | |
| ABE8.18-m | | | | | | S | | | | H | | | | R | | | | |
| ABE8.19-m | | | | | | S | | | | H | | R | | R | | | | |
| ABE8.20-m | | | | | Y | S | | | | H | | R | | R | | | | |
| ABE8.21-m | | | | | | | | | | | | R | | S | | | | |
| ABE8.22-m | | | | | | S | | | | | | | | S | | | | |
| ABE8.23-m | | | | | | S | | | | H | | | | | | | | |
| ABE8.24-m | | | | | | S | | | | H | | T | | | | | | |
| ABE8.1-d | | | | | | | | | | | | T | | | | | | |
| ABE8.2-d | | | | | | | | | | | | R | | | | | | |
| ABE8.3-d | | | | | | | | | | | | | | S | | | | |
| ABE8.4-d | | | | | | | | | | H | | | | | | | | |
| ABE8.5-d | | | | | | S | | | | | | | | | | | | |
| ABE8.6-d | | | | | | | | | | | | | | | | | | R |
| ABE8.7-d | | | | | | | | | | | | | | R | | | | |
| ABE8.8-d | | | | | | | | | | H | | R | | R | | | | |
| ABE8.9-d | | | | | Y | | | | | | | R | | R | | | | |
| ABE8.10-d | | | | | | | | | | | | R | | R | | | | R |
| ABE8.11-d | | | | | | | | | | | | T | | R | | | | |
| ABE8.12-d | | | | | | | | | | | | T | | S | | | | |
| ABE8.13-d | | | | | Y | | | | | H | | R | | R | | | | |
| ABE8.14-d | | | | | Y | S | | | | | | | | | | | | |
| ABE8.15-d | | | | | | S | | | | | | R | | | | | | |
| ABE8.16-d | | | | | | S | | | | H | | R | | | | | | |
| ABE8.17-d | | | | | | S | | | | | | | | R | | | | |
| ABE8.18-d | | | | | | S | | | | H | | | | R | | | | |
| ABE8.19-d | | | | | | S | | | | H | | R | | R | | | | |
| ABE8.20-d | | | | | Y | S | | | | H | | R | | R | | | | |
| ABE8.21-d | | | | | | | | | | | | R | | S | | | | |
| ABE8.22-d | | | | | | S | | | | | | | | S | | | | |
| ABE8.23-d | | | | | | S | | | | H | | | | | | | | |
| ABE8.24-d | | | | | | S | | | | H | | T | | | | | | |

[0583] In some embodiments, the base editor is ABE8.1, which comprises or consists essentially of the following sequence or a fragment thereof having adenosine deaminase activity:

ABE8.1_Y147T_CP5_NGC PAM_monomer
MSEVEFSHEYWMRHALTLAKRARDEREVPVGAVLVLNNRVIGEGWNRAIG
LHDPTAHAEIMALRQGGLVMQNYRLIDATLYVTFEPCVMCAGAMIHSRIG
RVVFGVRNAKTGAAGSLMDVLHYPGMNHRVEITEGILADECAALLCTFFR
MPRQVFNAQKKAQSSTD [symbol] [symbol]
EIGKATAKYFFYSNIMNFFKTEITLANGEIRKRPLIETNGE
TGEIVWDKGRDFATVRKVLSMPQVNIVKKTEVQTGGFSKES
ILPKRNSDKLIARKKDWDPKKYGGFMQPTVAYSVLVVAKVE
KGKSKKLKSVKELLGITIMERSSFEKNPIDFLEAKGYKEVK
KDLIIKLPKYSLFELENGRKRMLASAKFLQKGNELALPSKY
VNFLYLASHYEKLKGSPEDNEQKQLFVEQHKHYLDEIIEQI
SEFSKRVILADANLDKVLSAYNKHRDKPIREQAENIIHLFT
LTNLGAPRAFKYFDTTIARKEYRSTKEVLDATLIHQSITGL
YETRIDLSQLGGD

[symbol]

[symbol]

DKKYSIGLAIGTNSVGWAVITDEYKVPSKKFKVLGNTDRHS
IKKNLIGALLFDSGETAEATRLKRTARRRYTRRKNRICYLQ
EIFSNEMAKVDDSFFHRLEESFLVEEDKKHERHPIFGNIVD
EVAYHEKYPTIYHLRKKLVDSTDKADLRLIYLALAHMIKFR
GHFLIEGDLNPDNSDVDKLFIQLVQTYNQLFEENPINASGV
DAKAILSARLSKSRRLENLIAQLPGEKKNGLFGNLIALSLG
LTPNFKSNFDLAEDAKLQLSKDTYDDDLDNLLAQIGDQYAD
LFLAAKNLSDAILLSDILRVNTEITKAPLSASMIKRYDEHH
QDLTLLKALVRQQLPEKYKEIFFDQSKNGYAGYIDGGASQE
EFYKFIKPILEKMDGTEELLVKLNREDLLRKQRTFDNGSIP
HQIHLGELHAILRRQEDFYPFLKDNREKIEKILTFRIPYYV
GPLARGNSRFAWMTRKSEETITPWNFEEVVDKGASAQSFIE
RMTNFDKNLPNEKVLPKHSLLYEYFTVYNELTKVKYVTEGM
RKPAFLSGEQKKAIVDLLFKTNRKVTVKQLKEDYFKKIECF
DSVEISGVEDRFNASLGTYHDLLKIIKDKDFLDNEENEDIL
EDIVLTLTLFEDREMIEERLKTYAHLFDDKVMKQLKRRRYT
GWGRLSRKLINGIRDKQSGKTILDFLKSDGFANRNFMQLIH
DDSLTFKEDIQKAQVSGQGDSLHEHIANLAGSPAIKKGILQ
TVKVVDELVKVMGRHKPENIVIEMARENQTTQKGQKNSRER
MKRIEEGIKELGSQILKEHPVENTQLQNEKLYLYYLQNGRD
MYVDQELDINRLSDYDVDHIVPQSFLKDDSIDNKVLTRSDK
NRGKSDNVPSEEVVKKMKNYWRQLLNAKLITQRKFDNLTKA
ERGGLSELDKAGFIKRQLVETRQITKHVAQILDSRMNTKYD
ENDKLIREVKVITLKSKLVSDFRKDFQFYKVREINNYHHAH
DAYLNAVVGTALIKKYPKLESEFVYGDYKVYDVRKMIAKSE
QEGADKRTADGSEFESPKKKRKV*

[0584] In the above sequence, the plain text denotes an adenosine deaminase sequence, bold sequence indicates sequence derived from Cas9, the italicized sequence denotes a linker sequence, and the underlined sequence denotes a bipartite nuclear localization sequence.

[0585] In some embodiments, the base editor is ABE8.1, which comprises or consists essentially of the following sequence or a fragment thereof having adenosine deaminase activity:

pNMG-B335 ABE8.1_Y147T_CP5_NGC PAM_monomer
MSEVEFSHEYWMRHALTLAKRARDEREVPVGAVLVLNNRVIGEGWN
RAIGLHDPTAHAEIMALRQGGLVMQNYRLIDATLYVTFEPCVMCAG
AMIHSRIGRVVFGVRNAKTGAAGSLMDVLHYPGMNHRVEITEGILA
DECAALLCTFFRMPRQVFNAQKKAQSSTDSGGSSGGSSGSETPGTS
ESATPESSGGSSGGSEIGKATAKYFFYSNIMNFFKTEITLA
NGEIRKRPLIETNGETGEIVWDKGRDFATVRKVLSMPQVNI
VKKTEVQTGGFSKESILPKRNSDKLIARKKDWDPKKYGGFM
QPTVAYSVLVVAKVEKGKSKKLKSVKELLGITIMERSSFEK
NPIDFLEAKGYKEVKKDLIIKLPKYSLFELENGRKRMLASA
KFLQKGNELALPSKYVNFLYLASHYEKLKGSPEDNEQKQLF
VEQHKHYLDEIIEQISEFSKRVILADANLDKVLSAYNKHRD
KPIREQAENIIHLFTLTNLGAPRAFKYFDTTIARKEYRSTK
EVLDATLIHQSITGLYETRIDLSQLGGDGGSGGSGGSGGSG
GSGGSGGMDKKYSIGLAIGTNSVGWAVITDEYKVPSKKFKV
LGNTDRHSIKKNLIGALLFDSGETAEATRLKRTARRRYTRR
KNRICYLQEIFSNEMAKVDDSFFHRLEESFLVEEDKKHERH
PIFGNIVDEVAYHEKYPTIYHLRKKLVDSTDKADLRLIYLA
LAHMIKFRGHFLIEGDLNPDNSDVDKLFIQLVQTYNQLFEE
NPINASGVDAKAILSARLSKSRRLENLIAQLPGEKKNGLFG
NLIALSLGLTPNFKSNFDLAEDAKLQLSKDTYDDDLDNLLA
QIGDQYADLFLAAKNLSDAILLSDILRVNTEITKAPLSASM
IKRYDEHHQDLTLLKALVRQQLPEKYKEIFFDQSKNGYAGY
IDGGASQEEFYKFIKPILEKMDGTEELLVKLNREDLLRKQR
TFDNGSIPHQIHLGELHAILRRQEDFYPFLKDNREKIEKIL
TFRIPYYVGPLARGNSRFAWMTRKSEETITPWNFEEVVDKG
ASAQSFIERMTNFDKNLPNEKVLPKHSLLYEYFTVYNELTK
VKYVTEGMRKPAFLSGEQKKAIVDLLFKTNRKVTVKQLKED
YFKKIECFDSVEISGVEDRFNASLGTYHDLLKIIKDKDFLD
NEENEDILEDIVLTLTLFEDREMIEERLKTYAHLFDDKVMK
QLKRRRYTGWGRLSRKLINGIRDKQSGKTILDFLKSDGFAN
RNFMQLIHDDSLTFKEDIQKAQVSGQGDSLHEHIANLAGSP
AIKKGILQTVKVVDELVKVMGRHKPENIVIEMARENQTTQK
GQKNSRERMKRIEEGIKELGSQILKEHPVENTQLQNEKLYL
YYLQNGRDMYVDQELDINRLSDYDVDHIVPQSFLKDDSIDN
KVLTRSDKNRGKSDNVPSEEVVKKMKNYWRQLLNAKLITQR
KFDNLTKAERGGLSELDKAGFIKRQLVETRQITKHVAQILD
SRMNTKYDENDKLIREVKVITLKSKLVSDFRKDFQFYKVRE
INNYHHAHDAYLNAVVGTALIKKYPKLESEFVYGDYKVYDV
RKMIAKSEQEGADKRTADGSEFESPKKKRKV*

[0586] In the above sequence, the plain text denotes an adenosine deaminase sequence, bold sequence indicates sequence derived from Cas9, the italicized sequence denotes a linker sequence, and the underlined sequence denotes a bipartite nuclear localization sequence.

[0587] In some embodiments, the base editor is ABE8.14, which comprises or consists essentially of the following sequence or a fragment thereof having adenosine deaminase activity:

pNMG-357_ABE8.14 with NGC PAM CP5
MSEVEFSHEYWMRHALTLAKRAWDEREVPVGAVLVHNNRVI
GEGWNRPIGRHDPTAHAEIMALRQGGLVMQNYRLIDATLYV
TLEPCVMCAGAMIHSRIGRVVFGARDAKTGAAGSLMDVLHH
PGMNHRVEITEGILADECAALLSDFFRMRRQEIKAQKKAQS
STDGGSSGGSSGSETPGTSESATPESSGGSSGGSMSEVEFS
HEYWMRHALTLAKRARDEREVPVGAVLVLNNRVIGEGWNRA
IGLHDPTAHAEIMALRQGGLVMQNYRLIDATLYVTFEPCVM
CAGAMIHSRIGRVVFGVRNAKTGAAGSLMDVLHYPGMNHRV
EITEGILADECAALLCTFFRMPRQVFNAQKKAQSSTDSGGS
SGGSSGSETPGTSESATPESSGGSSGGS
EIGKATAKYFFYSNIMNFFKTEITLANGEIRKRPLIETNGE
TGEIVWDKGRDFATVRKVLSMPQVNIVKKTEVQTGGFSKES
ILPKRNSDKLIARKKDWDPKKYGGFMQPTVAYSVLVVAKVE
KGKSKKLKSVKELLGITIMERSSFEKNPIDFLEAKGYKEVK
KDLIIKLPKYSLFELENGRKRMLASAKFLQKGNELALPSKY
VNFLYLASHYEKLKGSPEDNEQKQLFVEQHKHYLDEIIEQI
SEFSKRVILADANLDKVLSAYNKHRDKPIREQAENIIHLFT
LTNLGAPRAFKYFDTTIARKEYRSTKEVLDATLIHQSITGL
YETRIDLSQLGGD
GGSGGSGGSGGSGGSGGSGGM
DKKYSIGLAIGTNSVGWAVITDEYKVPSKKFKVLGNTDRHS
IKKNLIGALLFDSGETAEATRLKRTARRRYTRRKNRICYLQ
EIFSNEMAKVDDSFFHRLEESFLVEEDKKHERHPIFGNIVD
EVAYHEKYPTIYHLRKKLVDSTDKADLRLIYLALAHMIKFR
GHFLIEGDLNPDNSDVDKLFIQLVQTYNQLFEENPINASGV
DAKAILSARLSKSRRLENLIAQLPGEKKNGLFGNLIALSLG
LTPNFKSNFDLAEDAKLQLSKDTYDDDLDNLLAQIGDQYAD
LFLAAKNLSDAILLSDILRVNTEITKAPLSASMIKRYDEHH
QDLTLLKALVRQQLPEKYKEIFFDQSKNGYAGYIDGGASQE
EFYKFIKPILEKMDGTEELLVKLNREDLLRKQRTFDNGSIP
HQIHLGELHAILRRQEDFYPFLKDNREKIEKILTFRIPYYV
GPLARGNSRFAWMTRKSEETITPWNFEEVVDKGASAQSFIE
RMTNFDKNLPNEKVLPKHSLLYEYFTVYNELTKVKYVTEGM
RKPAFLSGEQKKAIVDLLFKTNRKVTVKQLKEDYFKKIECF
DSVEISGVEDRFNASLGTYHDLLKIIKDKDFLDNEENEDIL
EDIVLTLTLFEDREMIEERLKTYAHLFDDKVMKQLKRRRYT
GWGRLSRKLINGIRDKQSGKTILDFLKSDGFANRNFMQLIH
DDSLTFKEDIQKAQVSGQGDSLHEHIANLAGSPAIKKGILQ
TVKVVDELVKVMGRHKPENIVIEMARENQTTQKGQKNSRER
MKRIEEGIKELGSQILKEHPVENTQLQNEKLYLYYLQNGRD
MYVDQELDINRLSDYDVDHIVPQSFLKDDSIDNKVLTRSDK
NRGKSDNVPSEEVVKKMKNYWRQLLNAKLITQRKFDNLTKA
ERGGLSELDKAGFIKRQLVETRQITKHVAQILDSRMNTKYD
ENDKLIREVKVITLKSKLVSDFRKDFQFYKVREINNYHHAH
DAYLNAVVGTALIKKYPKLESEFVYGDYKVYDVRKMIAKSE
QEGADKRTADGSEFESPKKKRKV*

[0588] In the above sequence, the plain text denotes an adenosine deaminase sequence, bold sequence indicates sequence derived from Cas9, the italicized sequence denotes a linker sequence, and the underlined sequence denotes a bipartite nuclear localization sequence.

[0589] In some embodiments, the base editor is ABE8.8-m, which comprises or consists essentially of the following sequence or a fragment thereof having adenosine deaminase activity:

ABE8.8-m
MSEVEFSHEYWMRHALTLAKRARDEREVPVGAVLVLNNRVI
GEGWNRAIGLHDPTAHAEIMALRQGGLVMQNYRLIDATLYV
TFEPCVMCAGAMIHSRIGRVVFGVRNAKTGAAGSLMDVLHH
PGMNHRVEITEGILADECAALLCRFFRMPRRVFNAQKKAQS
STDSGGSSGGSSGSETPGTSESATPESSGGSSGGS
DKKYSIGLAIGTNSVGWAVITDEYKVPSKKFKVLGNTDRHS
IKKNLIGALLFDSGETAEATRLKRTARRRYTRRKNRICYLQ
EIFSNEMAKVDDSFFHRLEESFLVEEDKKHERHPIFGNIVD
EVAYHEKYPTIYHLRKKLVDSTDKADLRLIYLALAHMIKFR
GHFLIEGDLNPDNSDVDKLFIQLVQTYNQLFEENPINASGV
DAKAILSARLSKSRRLENLIAQLPGEKKNGLFGNLIALSLG
LTPNFKSNFDLAEDAKLQLSKDTYDDDLDNLLAQIGDQYAD
LFLAAKNLSDAILLSDILRVNTEITKAPLSASMIKRYDEHH
QDLTLLKALVRQQLPEKYKEIFFDQSKNGYAGYIDGGASQE
EFYKFIKPILEKMDGTEELLVKLNREDLLRKQRTFDNGSIP
HQIHLGELHAILRRQEDFYPFLKDNREKIEKILTFRIPYYV
GPLARGNSRFAWMTRKSEETITPWNFEEVVDKGASAQSFIE
RMTNFDKNLPNEKVLPKHSLLYEYFTVYNELTKVKYVTEGM
RKPAFLSGEQKKAIVDLLFKTNRKVTVKQLKEDYFKKIECF
DSVEISGVEDRFNASLGTYHDLLKIIKDKDFLDNEENEDIL
EDIVLTLTLFEDREMIEERLKTYAHLFDDKVMKQLKRRRYT
GWGRLSRKLINGIRDKQSGKTILDFLKSDGFANRNFMQLIH
DDSLTFKEDIQKAQVSGQGDSLHEHIANLAGSPAIKKGILQ
TVKVVDELVKVMGRHKPENIVIEMARENQTTQKGQKNSRER
MKRIEEGIKELGSQILKEHPVENTQLQNEKLYLYYLQNGRD
MYVDQELDINRLSDYDVDHIVPQSFLKDDSIDNKVLTRSDK
NRGKSDNVPSEEVVKKMKNYWRQLLNAKLITQRKFDNLTKA
ERGGLSELDKAGFIKRQLVETRQITKHVAQILDSRMNTKYD
ENDKLIREVKVITLKSKLVSDFRKDFQFYKVREINNYHHAH
DAYLNAVVGTALIKKYPKLESEFVYGDYKVYDVRKMIAKSE
QEIGKATAKYFFYSNIMNFFKTEITLANGEIRKRPLIETNG
ETGEIVWDKGRDFATVRKVLSMPQVNIVKKTEVQTGGFSKE
SILPKRNSDKLIARKKDWDPKKYGGFDSPTVAYSVLVVAKV
EKGKSKKLKSVKELLGITIMERSSFEKNPIDFLEAKGYKEV
KKDLIIKLPKYSLFELENGRKRMLASAGELQKGNELALPSK
YVNFLYLASHYEKLKGSPEDNEQKQLFVEQHKHYLDEIIEQ
ISEFSKRVILADANLDKVLSAYNKHRDKPIREQAENIIHLF
TLTNLGAPAAFKYFDTTIDRKRYTSTKEVLDATLIHQSITG
LYETRIDLSQLGGDEGADKRTADGSEFESPKKKRKV*

[0590] In the above sequence, the plain text denotes an adenosine deaminase sequence, bold sequence indicates sequence derived from Cas9, the italicized sequence denotes a linker sequence, underlined sequence denotes a bipartite nuclear localization sequence, and double underlined sequence indicates mutations.

[0591] In some embodiments, the base editor is ABE8.8-d, which comprises or consists essentially of the following sequence or a fragment thereof having adenosine deaminase activity:

ABE8.8-d
MSEVEFSHEYWMRHALTLAKRAWDEREVPVGAVLVHNNRVI
GEGWNRPIGRHDPTAHAEIMALRQGGLVMQNYRLIDATLYV
TLEPCVMCAGAMIHSRIGRVVFGARDAKTGAAGSLMDVLHH
PGMNHRVEITEGILADECAALLSDFFRMRRQEIKAQKKAQS
STDSGGSSGGSSGSETPGTSESATPESSGGSSGGSSEVEFS
HEYWMRHALTLAKRARDEREVPVGAVLVLNNRVIGEGWNRA
IGLHDPTAHAEIMALRQGGLVMQNYRLIDATLYVTFEPCVM
CAGAMIHSRIGRVVFGVRNAKTGAAGSLMDVLHHPGMNHRV
EITEGILADECAALLCRFFRMPRRVFNAQKKAQSSTDSGGS
SGGSSGSETPGTSESATPESSGGSSGGS
DKKYSIGLAIGTNSVGWAVITDEYKVPSKKFKVLGNTDRHS
IKKNLIGALLFDSGETAEATRLKRTARRRYTRRKNRICYLQ
EIFSNEMAKVDDSFFHRLEESFLVEEDKKHERHPIFGNIVD
EVAYHEKYPTIYHLRKKLVDSTDKADLRLIYLALAHMIKFR
GHFLIEGDLNPDNSDVDKLFIQLVQTYNQLFEENPINASGV
DAKAILSARLSKSRRLENLIAQLPGEKKNGLFGNLIALSLG
LTPNFKSNFDLAEDAKLQLSKDTYDDDLDNLLAQIGDQYAD
LFLAAKNLSDAILLSDILRVNTEITKAPLSASMIKRYDEHH
QDLTLLKALVRQQLPEKYKEIFFDQSKNGYAGYIDGGASQE
EFYKFIKPILEKMDGTEELLVKLNREDLLRKQRTFDNGSIP
HQIHLGELHAILRRQEDFYPFLKDNREKIEKILTFRIPYYV
GPLARGNSRFAWMTRKSEETITPWNFEEVVDKGASAQSFIE
RMTNFDKNLPNEKVLPKHSLLYEYFTVYNELTKVKYVTEGM
RKPAFLSGEQKKAIVDLLFKTNRKVTVKQLKEDYFKKIECF
DSVEISGVEDRFNASLGTYHDLLKIIKDKDFLDNEENEDIL
EDIVLTLTLFEDREMIEERLKTYAHLFDDKVMKQLKRRRYT
GWGRLSRKLINGIRDKQSGKTILDFLKSDGFANRNFMQLIH
DDSLTFKEDIQKAQVSGQGDSLHEHIANLAGSPAIKKGILQ
TVKVVDELVKVMGRHKPENIVIEMARENQTTQKGQKNSRER
MKRIEEGIKELGSQILKEHPVENTQLQNEKLYLYYLQNGRD
MYVDQELDINRLSDYDVDHIVPQSFLKDDSIDNKVLTRSDK
NRGKSDNVPSEEVVKKMKNYWRQLLNAKLITQRKFDNLTKA
ERGGLSELDKAGFIKRQLVETRQITKHVAQILDSRMNTKYD
ENDKLIREVKVITLKSKLVSDFRKDFQFYKVREINNYHHAH
DAYLNAVVGTALIKKYPKLESEFVYGDYKVYDVRKMIAKSE
QEIGKATAKYFFYSNIMNFFKTEITLANGEIRKRPLIETNG
ETGEIVWDKGRDFATVRKVLSMPQVNIVKKTEVQTGGFSKE
SILPKRNSDKLIARKKDWDPKKYGGFDSPTVAYSVLVVAKV
EKGKSKKLKSVKELLGITIMERSSFEKNPIDFLEAKGYKEV
KKDLIIKLPKYSLFELENGRKRMLASAGELQKGNELALPSK
YVNFLYLASHYEKLKGSPEDNEQKQLFVEQHKHYLDEIIEQ
ISEFSKRVILADANLDKVLSAYNKHRDKPIREQAENIIHLF
TLTNLGAPAAFKYFDTTIDRKRYTSTKEVLDATLIHQSITG
LYETRIDLSQLGGDEGADKRTADGSEFESPKKKRKV*

[0592] In the above sequence, the plain text denotes an adenosine deaminase sequence, bold sequence indicates sequence derived from Cas9, the italicized sequence denotes a linker sequence, underlined sequence denotes a bipartite nuclear localization sequence, and double underlined sequence indicates mutations.

[0593] In some embodiments, the base editor is ABE8.13-m, which comprises or consists essentially of the following sequence or a fragment thereof having adenosine deaminase activity:

ABE8.13-m
MSEVEFSHEYWMRHALTLAKRARDEREVPVGAVLVLNNRVI
GEGWNRAIGLHDPTAHAEIMALRQGGLVMQNYRLYDATLYV
TFEPCVMCAGAMIHSRIGRVVFGVRNAKTGAAGSLMDVLHH
PGMNHRVEITEGILADECAALLCRFFRMPRRVFNAQKKAQS
STDSGGSSGGSSGSETPGTSESATPESSGGSSGGS
DKKYSIGLAIGTNSVGWAVITDEYKVPSKKFKVLGNTDRHS
IKKNLIGALLFDSGETAEATRLKRTARRRYTRRKNRICYLQ
EIFSNEMAKVDDSFFHRLEESFLVEEDKKHERHPIFGNIVD
EVAYHEKYPTIYHLRKKLVDSTDKADLRLIYLALAHMIKFR
GHFLIEGDLNPDNSDVDKLFIQLVQTYNQLFEENPINASGV
DAKAILSARLSKSRRLENLIAQLPGEKKNGLFGNLIALSLG
LTPNFKSNFDLAEDAKLQLSKDTYDDDLDNLLAQIGDQYAD
LFLAAKNLSDAILLSDILRVNTEITKAPLSASMIKRYDEHH
QDLTLLKALVRQQLPEKYKEIFFDQSKNGYAGYIDGGASQE
EFYKFIKPILEKMDGTEELLVKLNREDLLRKQRTFDNGSIP
HQIHLGELHAILRRQEDFYPFLKDNREKIEKILTFRIPYYV
GPLARGNSRFAWMTRKSEETITPWNFEEVVDKGASAQSFIE
RMTNFDKNLPNEKVLPKHSLLYEYFTVYNELTKVKYVTEGM
RKPAFLSGEQKKAIVDLLFKTNRKVTVKQLKEDYFKKIECF
DSVEISGVEDRFNASLGTYHDLLKIIKDKDFLDNEENEDIL
EDIVLTLTLFEDREMIEERLKTYAHLFDDKVMKQLKRRRYT
GWGRLSRKLINGIRDKQSGKTILDFLKSDGFANRNFMQLIH
DDSLTFKEDIQKAQVSGQGDSLHEHIANLAGSPAIKKGILQ
TVKVVDELVKVMGRHKPENIVIEMARENQTTQKGQKNSRER
MKRIEEGIKELGSQILKEHPVENTQLQNEKLYLYYLQNGRD
MYVDQELDINRLSDYDVDHIVPQSFLKDDSIDNKVLTRSDK
NRGKSDNVPSEEVVKKMKNYWRQLLNAKLITQRKFDNLTKA
ERGGLSELDKAGFIKRQLVETRQITKHVAQILDSRMNTKYD
ENDKLIREVKVITLKSKLVSDFRKDFQFYKVREINNYHHAH
DAYLNAVVGTALIKKYPKLESEFVYGDYKVYDVRKMIAKSE
QEIGKATAKYFFYSNIMNFFKTEITLANGEIRKRPLIETNG
ETGEIVWDKGRDFATVRKVLSMPQVNIVKKTEVQTGGFSKE
SILPKRNSDKLIARKKDWDPKKYGGFDSPTVAYSVLVVAKV
EKGKSKKLKSVKELLGITIMERSSFEKNPIDFLEAKGYKEV
KKDLIIKLPKYSLFELENGRKRMLASAGELQKGNELALPSK
YVNFLYLASHYEKLKGSPEDNEQKQLFVEQHKHYLDEIIEQ
ISEFSKRVILADANLDKVLSAYNKHRDKPIREQAENIIHLF
TLTNLGAPAAFKYFDTTIDRKRYTSTKEVLDATLIHQSITG
LYETRIDLSQLGGDEGADKRTADGSEFESPKKKRKV*

[0594] In the above sequence, the plain text denotes an adenosine deaminase sequence, bold sequence indicates sequence derived from Cas9, the italicized sequence denotes a linker sequence, underlined sequence denotes a bipartite nuclear localization sequence, and double underlined sequence indicates mutations.

[0595] In some embodiments, the base editor is ABE8.13-d, which comprises or consists essentially of the following sequence or a fragment thereof having adenosine deaminase activity:

ABE8.13-d
MSEVEFSHEYWMRHALTLAKRAWDEREVPVGAVLVHNNRVI
GEGWNRPIGRHDPTAHAEIMALRQGGLVMQNYRLIDATLYV
TLEPCVMCAGAMIHSRIGRVVFGARDAKTGAAGSLMDVLHH
PGMNHRVEITEGILADECAALLSDFFRMRRQEIKAQKKAQS
STDSGGSSGGSSGSETPGTSESATPESSGGSSGGSSEVEFS
HEYWMRHALTLAKRARDEREVPVGAVLVLNNRVIGEGWNRA
IGLHDPTAHAEIMALRQGGLVMQNYRLYDATLYVTFEPCVM
CAGAMIHSRIGRVVFGVRNAKTGAAGSLMDVLHHPGMNHRV
EITEGILADECAALLCRFFRMPRRVFNAQKKAQSSTDSGGS
SGGSSGSETPGTSESATPESSGGSSGGS
DKKYSIGLAIGTNSVGWAVITDEYKVPSKKFKVLGNTDRHS
IKKNLIGALLFDSGETAEATRLKRTARRRYTRRKNRICYLQ
EIFSNEMAKVDDSFFHRLEESFLVEEDKKHERHPIFGNIVD
EVAYHEKYPTIYHLRKKLVDSTDKADLRLIYLALAHMIKFR
GHFLIEGDLNPDNSDVDKLFIQLVQTYNQLFEENPINASGV
DAKAILSARLSKSRRLENLIAQLPGEKKNGLFGNLIALSLG
LTPNFKSNFDLAEDAKLQLSKDTYDDDLDNLLAQIGDQYAD
LFLAAKNLSDAILLSDILRVNTEITKAPLSASMIKRYDEHH
QDLTLLKALVRQQLPEKYKEIFFDQSKNGYAGYIDGGASQE
EFYKFIKPILEKMDGTEELLVKLNREDLLRKQRTFDNGSIP
HQIHLGELHAILRRQEDFYPFLKDNREKIEKILTFRIPYYV
GPLARGNSRFAWMTRKSEETITPWNFEEVVDKGASAQSFIE
RMTNFDKNLPNEKVLPKHSLLYEYFTVYNELTKVKYVTEGM
RKPAFLSGEQKKAIVDLLFKTNRKVTVKQLKEDYFKKIECF
DSVEISGVEDRFNASLGTYHDLLKIIKDKDFLDNEENEDIL
EDIVLTLTLFEDREMIEERLKTYAHLFDDKVMKQLKRRRYT
GWGRLSRKLINGIRDKQSGKTILDFLKSDGFANRNFMQLIH
DDSLTFKEDIQKAQVSGQGDSLHEHIANLAGSPAIKKGILQ
TVKVVDELVKVMGRHKPENIVIEMARENQTTQKGQKNSRER
MKRIEEGIKELGSQILKEHPVENTQLQNEKLYLYYLQNGRD
MYVDQELDINRLSDYDVDHIVPQSFLKDDSIDNKVLTRSDK
NRGKSDNVPSEEVVKKMKNYWRQLLNAKLITQRKFDNLTKA
ERGGLSELDKAGFIKRQLVETRQITKHVAQILDSRMNTKYD
ENDKLIREVKVITLKSKLVSDFRKDFQFYKVREINNYHHAH
DAYLNAVVGTALIKKYPKLESEFVYGDYKVYDVRKMIAKSE
QEIGKATAKYFFYSNIMNFFKTEITLANGEIRKRPLIETNG
ETGEIVWDKGRDFATVRKVLSMPQVNIVKKTEVQTGGFSKE
SILPKRNSDKLIARKKDWDPKKYGGFDSPTVAYSVLVVAKV
EKGKSKKLKSVKELLGITIMERSSFEKNPIDFLEAKGYKEV
KKDLIIKLPKYSLFELENGRKRMLASAGELQKGNELALPSK
YVNFLYLASHYEKLKGSPEDNEQKQLFVEQHKHYLDEIIEQ
ISEFSKRVILADANLDKVLSAYNKHRDKPIREQAENIIHLF
TLTNLGAPAAFKYFDTTIDRKRYTSTKEVLDATLIHQSITG
LYETRIDLSQLGGDEGADKRTADGSEFESPKKKRKV*

[0596] In the above sequence, the plain text denotes an adenosine deaminase sequence, bold sequence indicates sequence derived from Cas9, the italicized sequence denotes a linker sequence, underlined sequence denotes a bipartite nuclear localization sequence, and double underlined sequence indicates mutations.

[0597] In some embodiments, the base editor is ABE8.17-m, which comprises or consists essentially of the following sequence or a fragment thereof having adenosine deaminase activity:

ABE8.17-m
MSEVEFSHEYWMRHALTLAKRARDEREVPVGAVLVLNNRVI
GEGWNRAIGLHDPTAHAEIMALRQGGLVMQNYRLIDATLYS
TFEPCVMCAGAMIHSRIGRVVFGVRNAKTGAAGSLMDVLHY
PGMNHRVEITEGILADECAALLCYFFRMPRRVFNAQKKAQS
STDSGGSSGGSSGSETPGTSESATPESSGGSSGGS
DKKYSIGLAIGTNSVGWAVITDEYKVPSKKFKVLGNTDRHS
IKKNLIGALLFDSGETAEATRLKRTARRRYTRRKNRICYLQ
EIFSNEMAKVDDSFFHRLEESFLVEEDKKHERHPIFGNIVD
EVAYHEKYPTIYHLRKKLVDSTDKADLRLIYLALAHMIKFR
GHFLIEGDLNPDNSDVDKLFIQLVQTYNQLFEENPINASGV
DAKAILSARLSKSRRLENLIAQLPGEKKNGLFGNLIALSLG
LTPNFKSNFDLAEDAKLQLSKDTYDDDLDNLLAQIGDQYAD
LFLAAKNLSDAILLSDILRVNTEITKAPLSASMIKRYDEHH
QDLTLLKALVRQQLPEKYKEIFFDQSKNGYAGYIDGGASQE
EFYKFIKPILEKMDGTEELLVKLNREDLLRKQRTFDNGSIP
HQIHLGELHAILRRQEDFYPFLKDNREKIEKILTFRIPYYV
GPLARGNSRFAWMTRKSEETITPWNFEEVVDKGASAQSFIE
RMTNFDKNLPNEKVLPKHSLLYEYFTVYNELTKVKYVTEGM
RKPAFLSGEQKKAIVDLLFKTNRKVTVKQLKEDYFKKIECF
DSVEISGVEDRFNASLGTYHDLLKIIKDKDFLDNEENEDIL
EDIVLTLTLFEDREMIEERLKTYAHLFDDKVMKQLKRRRYT
GWGRLSRKLINGIRDKQSGKTILDFLKSDGFANRNFMQLIH
DDSLTFKEDIQKAQVSGQGDSLHEHIANLAGSPAIKKGILQ
TVKVVDELVKVMGRHKPENIVIEMARENQTTQKGQKNSRER
MKRIEEGIKELGSQILKEHPVENTQLQNEKLYLYYLQNGRD
MYVDQELDINRLSDYDVDHIVPQSFLKDDSIDNKVLTRSDK
NRGKSDNVPSEEVVKKMKNYWRQLLNAKLITQRKFDNLTKA
ERGGLSELDKAGFIKRQLVETRQITKHVAQILDSRMNTKYD
ENDKLIREVKVITLKSKLVSDFRKDFQFYKVREINNYHHAH
DAYLNAVVGTALIKKYPKLESEFVYGDYKVYDVRKMIAKSE
QEIGKATAKYFFYSNIMNFFKTEITLANGEIRKRPLIETNG
ETGEIVWDKGRDFATVRKVLSMPQVNIVKKTEVQTGGFSKE
SILPKRNSDKLIARKKDWDPKKYGGFDSPTVAYSVLVVAKV
EKGKSKKLKSVKELLGITIMERSSFEKNPIDFLEAKGYKEV
KKDLIIKLPKYSLFELENGRKRMLASAGELQKGNELALPSK
YVNFLYLASHYEKLKGSPEDNEQKQLFVEQHKHYLDEIIEQ
ISEFSKRVILADANLDKVLSAYNKHRDKPIREQAENIIHLF
TLTNLGAPAAFKYFDTTIDRKRYTSTKEVLDATLIHQSITG
LYETRIDLSQLGGDEGADKRTADGSEFESPKKKRKV*

[0598] In the above sequence, the plain text denotes an adenosine deaminase sequence, bold sequence indicates sequence derived from Cas9, the italicized sequence denotes a linker sequence, underlined sequence denotes a bipartite nuclear localization sequence, and double underlined sequence indicates mutations.

[0599] In some embodiments, the base editor is ABE8.17-d, which comprises or consists essentially of the following sequence or a fragment thereof having adenosine deaminase activity:

ABE8.17-d
MSEVEFSHEYWMRHALTLAKRAWDEREVPVGAVLVHNNRVI
GEGWNRPIGRHDPTAHAEIMALRQGGLVMQNYRLIDATLYV
TLEPCVMCAGAMIHSRIGRVVFGARDAKTGAAGSLMDVLHH
PGMNHRVEITEGILADECAALLSDFFRMRRQEIKAQKKAQS
STDSGGSSGGSSGSETPGTSESATPESSGGSSGGSSEVEFS
HEYWMRHALTLAKRARDEREVPVGAVLVLNNRVIGEGWNRA
IGLHDPTAHAEIMALRQGGLVMQNYRLIDATLYSTFEPCVM
CAGAMIHSRIGRVVFGVRNAKTGAAGSLMDVLHYPGMNHRV
EITEGILADECAALLCYFFRMPRRVFNAQKKAQSSTDSGGS
SGGSSGSETPGTSESATPESSGGSSGGS
DKKYSIGLAIGTNSVGWAVITDEYKVPSKKFKVLGNTDRHS
IKKNLIGALLFDSGETAEATRLKRTARRRYTRRKNRICYLQ
EIFSNEMAKVDDSFFHRLEESFLVEEDKKHERHPIFGNIVD
EVAYHEKYPTIYHLRKKLVDSTDKADLRLIYLALAHMIKFR
GHFLIEGDLNPDNSDVDKLFIQLVQTYNQLFEENPINASGV
DAKAILSARLSKSRRLENLIAQLPGEKKNGLFGNLIALSLG
LTPNFKSNFDLAEDAKLQLSKDTYDDDLDNLLAQIGDQYAD
LFLAAKNLSDAILLSDILRVNTEITKAPLSASMIKRYDEHH
QDLTLLKALVRQQLPEKYKEIFFDQSKNGYAGYIDGGASQE
EFYKFIKPILEKMDGTEELLVKLNREDLLRKQRTFDNGSIP
HQIHLGELHAILRRQEDFYPFLKDNREKIEKILTFRIPYYV
GPLARGNSRFAWMTRKSEETITPWNFEEVVDKGASAQSFIE
RMTNFDKNLPNEKVLPKHSLLYEYFTVYNELTKVKYVTEGM
RKPAFLSGEQKKAIVDLLFKTNRKVTVKQLKEDYFKKIECF
DSVEISGVEDRFNASLGTYHDLLKIIKDKDFLDNEENEDIL
EDIVLTLTLFEDREMIEERLKTYAHLFDDKVMKQLKRRRYT
GWGRLSRKLINGIRDKQSGKTILDFLKSDGFANRNFMQLIH
DDSLTFKEDIQKAQVSGQGDSLHEHIANLAGSPAIKKGILQ
TVKVVDELVKVMGRHKPENIVIEMARENQTTQKGQKNSRER
MKRIEEGIKELGSQILKEHPVENTQLQNEKLYLYYLQNGRD
MYVDQELDINRLSDYDVDHIVPQSFLKDDSIDNKVLTRSDK
NRGKSDNVPSEEVVKKMKNYWRQLLNAKLITQRKFDNLTKA
ERGGLSELDKAGFIKRQLVETRQITKHVAQILDSRMNTKYD
ENDKLIREVKVITLKSKLVSDFRKDFQFYKVREINNYHHAH
DAYLNAVVGTALIKKYPKLESEFVYGDYKVYDVRKMIAKSE
QEIGKATAKYFFYSNIMNFFKTEITLANGEIRKRPLIETNG
ETGEIVWDKGRDFATVRKVLSMPQVNIVKKTEVQTGGFSKE
SILPKRNSDKLIARKKDWDPKKYGGFDSPTVAYSVLVVAKV
EKGKSKKLKSVKELLGITIMERSSFEKNPIDFLEAKGYKEV
KKDLIIKLPKYSLFELENGRKRMLASAGELQKGNELALPSK
YVNFLYLASHYEKLKGSPEDNEQKQLFVEQHKHYLDEIIEQ
ISEFSKRVILADANLDKVLSAYNKHRDKPIREQAENIIHLF
TLTNLGAPAAFKYFDTTIDRKRYTSTKEVLDATLIHQSITG
LYETRIDLSQLGGDEGADKRTADGSEFESPKKKRKV*

[0600] In the above sequence, the plain text denotes an adenosine deaminase sequence, bold sequence indicates sequence derived from Cas9, the italicized sequence denotes a linker sequence, underlined sequence denotes a bipartite nuclear localization sequence, and double underlined sequence indicates mutations.

[0601] In some embodiments, the base editor is ABE8.20-m, which comprises or consists essentially of the following sequence or a fragment thereof having adenosine deaminase activity:

ABE8.20-m
MSEVEFSHEYWMRHALTLAKRARDEREVPVGAVLVLNNRVIGEGWNRAIG
LHDPTAHAEIMALRQGGLVMQNYRLYDATLYSTFEPCVMCAGAMIHSRIG
RVVFGVRNAKTGAAGSLMDVLHHPGMNHRVEITEGILADECAALLCRFFR
MPRRVFNAQKKAQSSTDSGGSSGGSSGSETPGTSESATPESSGGSSGGSD
KKYSIGL [symbol] IGTNSVGWAVITDEYKVPSKKFKVLGNTDRHSIKKNLIGALL
FDSGETAEATRLKRTARRRYTRRKNRICYLQEIFSNEMAKVDDSFFHRLE
ESFLVEEDKKHERHPIFGNIVDEVAYHEKYPTIYHLRKKLVDSTDKADLR
LIYLALAHMIKFRGHFLIEGDLNPDNSDVDKLFIQLVQTYNQLFEENPIN
ASGVDAKAILSARLSKSRRLENLIAQLPGEKKNGLFGNLIALSLGLTPNF
KSNFDLAEDAKLQLSKDTYDDDLDNLLAQIGDQYADLFLAAKNLSDAILL
SDILRVNTEITKAPLSASMIKRYDEHHQDLTLLKALVRQQLPEKYKEIFF
DQSKNGYAGYIDGGASQEEFYKFIKPILEKMDGTEELLVKLNREDLLRKQ
RTFDNGSIPHQIHLGELHAILRRQEDFYPFLKDNREKIEKILTFRIPYYV
GPLARGNSRFAWMTRKSEETITPWNFEEVVDKGASAQSFIERMTNFDKNL
PNEKVLPKHSLLYEYFTVYNELTKVKYVTEGMRKPAFLSGEQKKAIVDLL
FKTNRKVTVKQLKEDYFKKIECFDSVEISGVEDRFNASLGTYHDLLKIIK
DKDFLDNEENEDILEDIVLTLTLFEDREMIEERLKTYAHLFDDKVMKQLK
RRRYTGWGRLSRKLINGIRDKQSGKTILDFLKSDGFANRNFMQLIHDDSL
TFKEDIQKAQVSGQGDSLHEHIANLAGSPAIKKGILQTVKVVDELVKVMG
RHKPENIVIEMARENQTTQKGQKNSRERMKRIEEGIKELGSQILKEHPVE
NTQLQNEKLYLYYLQNGRDMYVDQELDINRLSDYDVDHIVPQSFLKDDSI
DNKVLTRSDKNRGKSDNVPSEEVVKKMKNYWRQLLNAKLITQRKFDNLTK
AERGGLSELDKAGFIKRQLVETRQITKHVAQILDSRMNTKYDENDKLIRE
VKVITLKSKLVSDFRKDFQFYKVREINNYHHAHDAYLNAVVGTALIKKYP
KLESEFVYGDYKVYDVRKMIAKSEQEIGKATAKYFFYSNIMNFFKTEITL
ANGEIRKRPLIETNGETGEIVWDKGRDFATVRKVLSMPQVNIVKKTEVQT
GGFSKESILPKRNSDKLIARKKDWDPKKYGGFDSPTVAYSVLVVAKVEKG
KSKKLKSVKELLGITIMERSSFEKNPIDFLEAKGYKEVKKDLIIKLPKYS
LFELENGRKRMLASAGELQKGNELALPSKYVNFLYLASHYEKLKGSPEDN
EQKQLFVEQHKHYLDEIIEQISEFSKRVILADANLDKVLSAYNKHRDKPI
REQAENIIHLFTLTNLGAPAAFKYFDTTIDRKRYTSTKEVLDATLIHQSI
TGLYETRIDLSQLGGDEGADKRTADGSEFESPKKKRKV*

[0602] In the above sequence, the plain text denotes an adenosine deaminase sequence, bold sequence indicates sequence derived from Cas9, the italicized sequence denotes a linker sequence, underlined sequence denotes a bipartite nuclear localization sequence, and double underlined sequence indicates mutations.

[0603] In some embodiments, the base editor is ABE8.20-d, which comprises or consists essentially of the following sequence or a fragment thereof having adenosine deaminase activity:

ABE8.20-d
MSEVEFSHEYWMRHALTLAKRAWDEREVPVGAVLVHNNRVIGEGWNRPIG
RHDPTAHAEIMALRQGGLVMQNYRLIDATLYVTLEPCVMCAGAMIHSRIG
RVVFGARDAKTGAAGSLMDVLHHPGMNHRVEITEGILADECAALLSDFFR
MRRQEIKAQKKAQSSTDSGGSSGGSSGSETPGTSESATPESSGGSSGGSS
EVEFSHEYWMRHALTLAKRARDEREVPVGAVLVLNNRVIGEGWNRAIGLH
DPTAHAEIMALRQGGLVMQNYRLYDATLYSTFEPCVMCAGAMIHSRIGRV
VFGVRNAKTGAAGSLMDVLHHPGMNHRVEITEGILADECAALLCRFFRMP
RRVFNAQKKAQSSTDSGGSSGGSSGSETPGTSESATPESSGGSSGGSDKK
YSIGL [symbol] IGTNSVGWAVITDEYKVPSKKFKVLGNTDRHSIKKNLIGALLFD
SGETAEATRLKRTARRRYTRRKNRICYLQEIFSNEMAKVDDSFFHRLEES
FLVEEDKKHERHPIFGNIVDEVAYHEKYPTIYHLRKKLVDSTDKADLRLI
YLALAHMIKFRGHFLIEGDLNPDNSDVDKLFIQLVQTYNQLFEENPINAS
GVDAKAILSARLSKSRRLENLIAQLPGEKKNGLFGNLIALSLGLTPNFKS
NFDLAEDAKLQLSKDTYDDDLDNLLAQIGDQYADLFLAAKNLSDAILLSD
ILRVNTEITKAPLSASMIKRYDEHHQDLTLLKALVRQQLPEKYKEIFFDQ
SKNGYAGYIDGGASQEEFYKFIKPILEKMDGTEELLVKLNREDLLRKQRT
FDNGSIPHQIHLGELHAILRRQEDFYPFLKDNREKIEKILTFRIPYYVGP
LARGNSRFAWMTRKSEETITPWNFEEVVDKGASAQSFIERMTNFDKNLPN
EKVLPKHSLLYEYFTVYNELTKVKYVTEGMRKPAFLSGEQKKAIVDLLFK
TNRKVTVKQLKEDYFKKIECFDSVEISGVEDRFNASLGTYHDLLKIIKDK
DFLDNEENEDILEDIVLTLTLFEDREMIEERLKTYAHLFDDKVMKQLKRR
RYTGWGRLSRKLINGIRDKQSGKTILDFLKSDGFANRNFMQLIHDDSLTF
KEDIQKAQVSGQGDSLHEHIANLAGSPAIKKGILQTVKVVDELVKVMGRH
KPENIVIEMARENQTTQKGQKNSRERMKRIEEGIKELGSQILKEHPVENT
QLQNEKLYLYYLQNGRDMYVDQELDINRLSDYDVDHIVPQSFLKDDSIDN
KVLTRSDKNRGKSDNVPSEEVVKKMKNYWRQLLNAKLITQRKFDNLTKAE
RGGLSELDKAGFIKRQLVETRQITKHVAQILDSRMNTKYDENDKLIREVK
VITLKSKLVSDFRKDFQFYKVREINNYHHAHDAYLNAVVGTALIKKYPKL
ESEFVYGDYKVYDVRKMIAKSEQEIGKATAKYFFYSNIMNFFKTEITLAN
GEIRKRPLIETNGETGEIVWDKGRDFATVRKVLSMPQVNIVKKTEVQTGG
FSKESILPKRNSDKLIARKKDWDPKKYGGFDSPTVAYSVLVVAKVEKGKS
KKLKSVKELLGITIMERSSFEKNPIDFLEAKGYKEVKKDLIIKLPKYSLF
ELENGRKRMLASAGELQKGNELALPSKYVNFLYLASHYEKLKGSPEDNEQ
KQLFVEQHKHYLDEIIEQISEFSKRVILADANLDKVLSAYNKHRDKPIRE
QAENIIHLFTLTNLGAPAAFKYFDTTIDRKRYTSTKEVLDATLIHQSITG
LYETRIDLSQLGGDEGADKRTADGSEFESPKKKRKV*

[0604] In the above sequence, the plain text denotes an adenosine deaminase sequence, bold sequence indicates sequence derived from Cas9, the italicized sequence denotes a linker sequence, underlined sequence denotes a bipartite nuclear localization sequence, and double underlined sequence indicates mutations.

[0605] In some embodiments, an ABE8 of the invention is selected from the following sequences:

01. monoABE8.1_bpNLS + Y147T
MSEVEFSHEYWMRHALTLAKRARDEREVPVGAVLVLNNRVIGEGWNRAIGLHDPTAHAEIMA
LRQGGLVMQNYRLIDATLYVTFEPCVMCAGAMIHSRIGRVVFGVRNAKTGAAGSLMDVLHYP
GMNHRVEITEGILADECAALLCTFFRMPRQVFNAQKKAQSSTDSGGSSGGSSGSETPGTSES
ATPESSGGSSGGSDKKYSIGLAIGTNSVGWAVITDEYKVPSKKFKVLGNTDRHSIKKNLIGA
LLFDSGETAEATRLKRTARRRYTRRKNRICYLQEIFSNEMAKVDDSFFHRLEESFLVEEDKK
HERHPIFGNIVDEVAYHEKYPTIYHLRKKLVDSTDKADLRLIYLALAHMIKFRGHFLIEGDL
NPDNSDVDKLFIQLVQTYNQLFEENPINASGVDAKAILSARLSKSRRLENLIAQLPGEKKNG
LFGNLIALSLGLTPNFKSNFDLAEDAKLQLSKDTYDDDLDNLLAQIGDQYADLFLAAKNLSD
AILLSDILRVNTEITKAPLSASMIKRYDEHHQDLTLLKALVRQQLPEKYKEIFFDQSKNGYA
GYIDGGASQEEFYKFIKPILEKMDGTEELLVKLNREDLLRKQRTFDNGSIPHQIHLGELHAI
LRRQEDFYPFLKDNREKIEKILTFRIPYYVGPLARGNSRFAWMTRKSEETITPWNFEEVVDK
GASAQSFIERMTNFDKNLPNEKVLPKHSLLYEYFTVYNELTKVKYVTEGMRKPAFLSGEQKK
AIVDLLFKTNRKVTVKQLKEDYFKKIECFDSVEISGVEDRFNASLGTYHDLLKIIKDKDFLD
NEENEDILEDIVLTLTLFEDREMIEERLKTYAHLFDDKVMKQLKRRRYTGWGRLSRKLINGI
RDKQSGKTILDFLKSDGFANRNFMQLIHDDSLTFKEDIQKAQVSGQGDSLHEHIANLAGSPA
IKKGILQTVKVVDELVKVMGRHKPENIVIEMARENQTTQKGQKNSRERMKRIEEGIKELGSQ
ILKEHPVENTQLQNEKLYLYYLQNGRDMYVDQELDINRLSDYDVDHIVPQSFLKDDSIDNKV
LTRSDKNRGKSDNVPSEEVVKKMKNYWRQLLNAKLITQRKFDNLTKAERGGLSELDKAGFIK
RQLVETRQITKHVAQILDSRMNTKYDENDKLIREVKVITLKSKLVSDFRKDFQFYKVREINN
YHHAHDAYLNAVVGTALIKKYPKLESEFVYGDYKVYDVRKMIAKSEQEIGKATAKYFFYSNI
MNFFKTEITLANGEIRKRPLIETNGETGEIVWDKGRDFATVRKVLSMPQVNIVKKTEVQTGG
FSKESILPKRNSDKLIARKKDWDPKKYGGFVSPTVAYSVLVVAKVEKGKSKKLKSVKELLGI
TIMERSSFEKNPIDFLEAKGYKEVKKDLIIKLPKYSLFELENGRKRMLASARELQKGNELAL
PSKYVNFLYLASHYEKLKGSPEDNEQKQLFVEQHKHYLDEIIEQISEFSKRVILADANLDKV
LSAYNKHRDKPIREQAENIIHLFTLTNLGAPAAFKYFDTTIDRKQYRSTKEVLDATLIHQSI
TGLYETRIDLSQLGGDEGADKRTADGSEFESPKKKRKV
02. monoABE8.1_bpNLS + Y147R
MSEVEFSHEYWMRHALTLAKRARDEREVPVGAVLVLNNRVIGEGWNRAIGLHDPTAHAEIMA
LRQGGLVMQNYRLIDATLYVTFEPCVMCAGAMIHSRIGRVVFGVRNAKTGAAGSLMDVLHYP
GMNHRVEITEGILADECAALLCRFFRMPRQVFNAQKKAQSSTDSGGSSGGSSGSETPGTSES
ATPESSGGSSGGSDKKYSIGLAIGTNSVGWAVITDEYKVPSKKFKVLGNTDRHSIKKNLIGA
LLFDSGETAEATRLKRTARRRYTRRKNRICYLQEIFSNEMAKVDDSFFHRLEESFLVEEDKK
HERHPIFGNIVDEVAYHEKYPTIYHLRKKLVDSTDKADLRLIYLALAHMIKFRGHFLIEGDL
NPDNSDVDKLFIQLVQTYNQLFEENPINASGVDAKAILSARLSKSRRLENLIAQLPGEKKNG
LFGNLIALSLGLTPNFKSNFDLAEDAKLQLSKDTYDDDLDNLLAQIGDQYADLFLAAKNLSD
AILLSDILRVNTEITKAPLSASMIKRYDEHHQDLTLLKALVRQQLPEKYKEIFFDQSKNGYA
GYIDGGASQEEFYKFIKPILEKMDGTEELLVKLNREDLLRKQRTFDNGSIPHQIHLGELHAI
LRRQEDFYPFLKDNREKIEKILTFRIPYYVGPLARGNSRFAWMTRKSEETITPWNFEEVVDK
GASAQSFIERMTNFDKNLPNEKVLPKHSLLYEYFTVYNELTKVKYVTEGMRKPAFLSGEQKK
AIVDLLFKTNRKVTVKQLKEDYFKKIECFDSVEISGVEDRFNASLGTYHDLLKIIKDKDFLD
NEENEDILEDIVLTLTLFEDREMIEERLKTYAHLFDDKVMKQLKRRRYTGWGRLSRKLINGI
RDKQSGKTILDFLKSDGFANRNFMQLIHDDSLTFKEDIQKAQVSGQGDSLHEHIANLAGSPA
IKKGILQTVKVVDELVKVMGRHKPENIVIEMARENQTTQKGQKNSRERMKRIEEGIKELGSQ
ILKEHPVENTQLQNEKLYLYYLQNGRDMYVDQELDINRLSDYDVDHIVPQSFLKDDSIDNKV
LTRSDKNRGKSDNVPSEEVVKKMKNYWRQLLNAKLITQRKFDNLTKAERGGLSELDKAGFIK
RQLVETRQITKHVAQILDSRMNTKYDENDKLIREVKVITLKSKLVSDFRKDFQFYKVREINN
YHHAHDAYLNAVVGTALIKKYPKLESEFVYGDYKVYDVRKMIAKSEQEIGKATAKYFFYSNI
MNFFKTEITLANGEIRKRPLIETNGETGEIVWDKGRDFATVRKVLSMPQVNIVKKTEVQTGG
FSKESILPKRNSDKLIARKKDWDPKKYGGFVSPTVAYSVLVVAKVEKGKSKKLKSVKELLGI
TIMERSSFEKNPIDFLEAKGYKEVKKDLIIKLPKYSLFELENGRKRMLASARELQKGNELAL
PSKYVNFLYLASHYEKLKGSPEDNEQKQLFVEQHKHYLDEIIEQISEFSKRVILADANLDKV
LSAYNKHRDKPIREQAENIIHLFTLTNLGAPAAFKYFDTTIDRKQYRSTKEVLDATLIHQSI
TGLYETRIDLSQLGGDEGADKRTADGSEFESPKKKRKV
03. monoABE8.1_bpNLS + Q154S
MSEVEFSHEYWMRHALTLAKRARDEREVPVGAVLVLNNRVIGEGWNRAIGLHDPTAHAEIMA
LRQGGLVMQNYRLIDATLYVTFEPCVMCAGAMIHSRIGRVVFGVRNAKTGAAGSLMDVLHYP
GMNHRVEITEGILADECAALLCYFFRMPRSVFNAQKKAQSSTDSGGSSGGSSGSETPGTSES
ATPESSGGSSGGSDKKYSIGLAIGTNSVGWAVITDEYKVPSKKFKVLGNTDRHSIKKNLIGA
LLFDSGETAEATRLKRTARRRYTRRKNRICYLQEIFSNEMAKVDDSFFHRLEESFLVEEDKK
HERHPIFGNIVDEVAYHEKYPTIYHLRKKLVDSTDKADLRLIYLALAHMIKFRGHFLIEGDL
NPDNSDVDKLFIQLVQTYNQLFEENPINASGVDAKAILSARLSKSRRLENLIAQLPGEKKNG
LFGNLIALSLGLTPNFKSNFDLAEDAKLQLSKDTYDDDLDNLLAQIGDQYADLFLAAKNLSD
AILLSDILRVNTEITKAPLSASMIKRYDEHHQDLTLLKALVRQQLPEKYKEIFFDQSKNGYA
GYIDGGASQEEFYKFIKPILEKMDGTEELLVKLNREDLLRKQRTFDNGSIPHQIHLGELHAI
LRRQEDFYPFLKDNREKIEKILTFRIPYYVGPLARGNSRFAWMTRKSEETITPWNFEEVVDK
GASAQSFIERMTNFDKNLPNEKVLPKHSLLYEYFTVYNELTKVKYVTEGMRKPAFLSGEQKK
AIVDLLFKTNRKVTVKQLKEDYFKKIECFDSVEISGVEDRFNASLGTYHDLLKIIKDKDFLD
NEENEDILEDIVLTLTLFEDREMIEERLKTYAHLFDDKVMKQLKRRRYTGWGRLSRKLINGI
RDKQSGKTILDFLKSDGFANRNFMQLIHDDSLTFKEDIQKAQVSGQGDSLHEHIANLAGSPA
IKKGILQTVKVVDELVKVMGRHKPENIVIEMARENQTTQKGQKNSRERMKRIEEGIKELGSQ
ILKEHPVENTQLQNEKLYLYYLQNGRDMYVDQELDINRLSDYDVDHIVPQSFLKDDSIDNKV
LTRSDKNRGKSDNVPSEEVVKKMKNYWRQLLNAKLITQRKFDNLTKAERGGLSELDKAGFIK
RQLVETRQITKHVAQILDSRMNTKYDENDKLIREVKVITLKSKLVSDFRKDFQFYKVREINN
YHHAHDAYLNAVVGTALIKKYPKLESEFVYGDYKVYDVRKMIAKSEQEIGKATAKYFFYSNI
MNFFKTEITLANGEIRKRPLIETNGETGEIVWDKGRDFATVRKVLSMPQVNIVKKTEVQTGG
FSKESILPKRNSDKLIARKKDWDPKKYGGFVSPTVAYSVLVVAKVEKGKSKKLKSVKELLGI
TIMERSSFEKNPIDFLEAKGYKEVKKDLIIKLPKYSLFELENGRKRMLASARELQKGNELAL
PSKYVNFLYLASHYEKLKGSPEDNEQKQLFVEQHKHYLDEIIEQISEFSKRVILADANLDKV
LSAYNKHRDKPIREQAENIIHLFTLTNLGAPAAFKYFDTTIDRKQYRSTKEVLDATLIHQSI
TGLYETRIDLSQLGGDEGADKRTADGSEFESPKKKRKV
04. monoABE8.1_bpNLS + Y123H
MSEVEFSHEYWMRHALTLAKRARDEREVPVGAVLVLNNRVIGEGWNRAIGLHDPTAHAEIMA
LRQGGLVMQNYRLIDATLYVTFEPCVMCAGAMIHSRIGRVVFGVRNAKTGAAGSLMDVLHHP
GMNHRVEITEGILADECAALLCYFFRMPRQVFNAQKKAQSSTDSGGSSGGSSGSETPGTSES
ATPESSGGSSGGSDKKYSIGLAIGTNSVGWAVITDEYKVPSKKFKVLGNTDRHSIKKNLIGA
LLFDSGETAEATRLKRTARRRYTRRKNRICYLQEIFSNEMAKVDDSFFHRLEESFLVEEDKK
HERHPIFGNIVDEVAYHEKYPTIYHLRKKLVDSTDKADLRLIYLALAHMIKFRGHFLIEGDL
NPDNSDVDKLFIQLVQTYNQLFEENPINASGVDAKAILSARLSKSRRLENLIAQLPGEKKNG
LFGNLIALSLGLTPNFKSNFDLAEDAKLQLSKDTYDDDLDNLLAQIGDQYADLFLAAKNLSD
AILLSDILRVNTEITKAPLSASMIKRYDEHHQDLTLLKALVRQQLPEKYKEIFFDQSKNGYA
GYIDGGASQEEFYKFIKPILEKMDGTEELLVKLNREDLLRKQRTFDNGSIPHQIHLGELHAI
LRRQEDFYPFLKDNREKIEKILTFRIPYYVGPLARGNSRFAWMTRKSEETITPWNFEEVVDK
GASAQSFIERMTNFDKNLPNEKVLPKHSLLYEYFTVYNELTKVKYVTEGMRKPAFLSGEQKK
AIVDLLFKTNRKVTVKQLKEDYFKKIECFDSVEISGVEDRFNASLGTYHDLLKIIKDKDFLD
NEENEDILEDIVLTLTLFEDREMIEERLKTYAHLFDDKVMKQLKRRRYTGWGRLSRKLINGI
RDKQSGKTILDFLKSDGFANRNFMQLIHDDSLTFKEDIQKAQVSGQGDSLHEHIANLAGSPA
IKKGILQTVKVVDELVKVMGRHKPENIVIEMARENQTTQKGQKNSRERMKRIEEGIKELGSQ
ILKEHPVENTQLQNEKLYLYYLQNGRDMYVDQELDINRLSDYDVDHIVPQSFLKDDSIDNKV
LTRSDKNRGKSDNVPSEEVVKKMKNYWRQLLNAKLITQRKFDNLTKAERGGLSELDKAGFIK
RQLVETRQITKHVAQILDSRMNTKYDENDKLIREVKVITLKSKLVSDFRKDFQFYKVREINN
YHHAHDAYLNAVVGTALIKKYPKLESEFVYGDYKVYDVRKMIAKSEQEIGKATAKYFFYSNI
MNFFKTEITLANGEIRKRPLIETNGETGEIVWDKGRDFATVRKVLSMPQVNIVKKTEVQTGG
FSKESILPKRNSDKLIARKKDWDPKKYGGFVSPTVAYSVLVVAKVEKGKSKKLKSVKELLGI
TIMERSSFEKNPIDFLEAKGYKEVKKDLIIKLPKYSLFELENGRKRMLASARELQKGNELAL
PSKYVNFLYLASHYEKLKGSPEDNEQKQLFVEQHKHYLDEIIEQISEFSKRVILADANLDKV
LSAYNKHRDKPIREQAENIIHLFTLTNLGAPAAFKYFDTTIDRKQYRSTKEVLDATLIHQSI
TGLYETRIDLSQLGGDEGADKRTADGSEFESPKKKRKV
05. monoABE8.1_bpNLS + V82S
MSEVEFSHEYWMRHALTLAKRARDEREVPVGAVLVLNNRVIGEGWNRAIGLHDPTAHAEIMA
LRQGGLVMQNYRLIDATLYSTFEPCVMCAGAMIHSRIGRVVFGVRNAKTGAAGSLMDVLHYP
GMNHRVEITEGILADECAALLCYFFRMPRQVFNAQKKAQSSTDSGGSSGGSSGSETPGTSES
ATPESSGGSSGGSDKKYSIGLAIGTNSVGWAVITDEYKVPSKKFKVLGNTDRHSIKKNLIGA
LLFDSGETAEATRLKRTARRRYTRRKNRICYLQEIFSNEMAKVDDSFFHRLEESFLVEEDKK
HERHPIFGNIVDEVAYHEKYPTIYHLRKKLVDSTDKADLRLIYLALAHMIKFRGHFLIEGDL
NPDNSDVDKLFIQLVQTYNQLFEENPINASGVDAKAILSARLSKSRRLENLIAQLPGEKKNG
LFGNLIALSLGLTPNFKSNFDLAEDAKLQLSKDTYDDDLDNLLAQIGDQYADLFLAAKNLSD
AILLSDILRVNTEITKAPLSASMIKRYDEHHQDLTLLKALVRQQLPEKYKEIFFDQSKNGYA
GYIDGGASQEEFYKFIKPILEKMDGTEELLVKLNREDLLRKQRTFDNGSIPHQIHLGELHAI
LRRQEDFYPFLKDNREKIEKILTFRIPYYVGPLARGNSRFAWMTRKSEETITPWNFEEVVDK
GASAQSFIERMTNFDKNLPNEKVLPKHSLLYEYFTVYNELTKVKYVTEGMRKPAFLSGEQKK
AIVDLLFKTNRKVTVKQLKEDYFKKIECFDSVEISGVEDRFNASLGTYHDLLKIIKDKDFLD
NEENEDILEDIVLTLTLFEDREMIEERLKTYAHLFDDKVMKQLKRRRYTGWGRLSRKLINGI
RDKQSGKTILDFLKSDGFANRNFMQLIHDDSLTFKEDIQKAQVSGQGDSLHEHIANLAGSPA
IKKGILQTVKVVDELVKVMGRHKPENIVIEMARENQTTQKGQKNSRERMKRIEEGIKELGSQ
ILKEHPVENTQLQNEKLYLYYLQNGRDMYVDQELDINRLSDYDVDHIVPQSFLKDDSIDNKV
LTRSDKNRGKSDNVPSEEVVKKMKNYWRQLLNAKLITQRKFDNLTKAERGGLSELDKAGFIK
RQLVETRQITKHVAQILDSRMNTKYDENDKLIREVKVITLKSKLVSDFRKDFQFYKVREINN
YHHAHDAYLNAVVGTALIKKYPKLESEFVYGDYKVYDVRKMIAKSEQEIGKATAKYFFYSNI
MNFFKTEITLANGEIRKRPLIETNGETGEIVWDKGRDFATVRKVLSMPQVNIVKKTEVQTGG
FSKESILPKRNSDKLIARKKDWDPKKYGGFVSPTVAYSVLVVAKVEKGKSKKLKSVKELLGI
TIMERSSFEKNPIDFLEAKGYKEVKKDLIIKLPKYSLFELENGRKRMLASARELQKGNELAL
PSKYVNFLYLASHYEKLKGSPEDNEQKQLFVEQHKHYLDEIIEQISEFSKRVILADANLDKV
LSAYNKHRDKPIREQAENIIHLFTLTNLGAPAAFKYFDTTIDRKQYRSTKEVLDATLIHQSI
TGLYETRIDLSQLGGDEGADKRTADGSEFESPKKKRKV
06. monoABE8.1_bpNLS + T166R
MSEVEFSHEYWMRHALTLAKRARDEREVPVGAVLVLNNRVIGEGWNRAIGLHDPTAHAEIMA
LRQGGLVMQNYRLIDATLYVTFEPCVMCAGAMIHSRIGRVVFGVRNAKTGAAGSLMDVLHYP
GMNHRVEITEGILADECAALLCYFFRMPRQVFNAQKKAQSSRDSGGSSGGSSGSETPGTSES
ATPESSGGSSGGSDKKYSIGLAIGTNSVGWAVITDEYKVPSKKFKVLGNTDRHSIKKNLIGA
LLFDSGETAEATRLKRTARRRYTRRKNRICYLQEIFSNEMAKVDDSFFHRLEESFLVEEDKK
HERHPIFGNIVDEVAYHEKYPTIYHLRKKLVDSTDKADLRLIYLALAHMIKFRGHFLIEGDL
NPDNSDVDKLFIQLVQTYNQLFEENPINASGVDAKAILSARLSKSRRLENLIAQLPGEKKNG
LFGNLIALSLGLTPNFKSNFDLAEDAKLQLSKDTYDDDLDNLLAQIGDQYADLFLAAKNLSD
AILLSDILRVNTEITKAPLSASMIKRYDEHHQDLTLLKALVRQQLPEKYKEIFFDQSKNGYA
GYIDGGASQEEFYKFIKPILEKMDGTEELLVKLNREDLLRKQRTFDNGSIPHQIHLGELHAI
LRRQEDFYPFLKDNREKIEKILTFRIPYYVGPLARGNSRFAWMTRKSEETITPWNFEEVVDK
GASAQSFIERMTNFDKNLPNEKVLPKHSLLYEYFTVYNELTKVKYVTEGMRKPAFLSGEQKK
AIVDLLFKTNRKVTVKQLKEDYFKKIECFDSVEISGVEDRFNASLGTYHDLLKIIKDKDFLD
NEENEDILEDIVLTLTLFEDREMIEERLKTYAHLFDDKVMKQLKRRRYTGWGRLSRKLINGI
RDKQSGKTILDFLKSDGFANRNFMQLIHDDSLTFKEDIQKAQVSGQGDSLHEHIANLAGSPA
IKKGILQTVKVVDELVKVMGRHKPENIVIEMARENQTTQKGQKNSRERMKRIEEGIKELGSQ
ILKEHPVENTQLQNEKLYLYYLQNGRDMYVDQELDINRLSDYDVDHIVPQSFLKDDSIDNKV
LTRSDKNRGKSDNVPSEEVVKKMKNYWRQLLNAKLITQRKFDNLTKAERGGLSELDKAGFIK
RQLVETRQITKHVAQILDSRMNTKYDENDKLIREVKVITLKSKLVSDFRKDFQFYKVREINN
YHHAHDAYLNAVVGTALIKKYPKLESEFVYGDYKVYDVRKMIAKSEQEIGKATAKYFFYSNI
MNFFKTEITLANGEIRKRPLIETNGETGEIVWDKGRDFATVRKVLSMPQVNIVKKTEVQTGG
FSKESILPKRNSDKLIARKKDWDPKKYGGFVSPTVAYSVLVVAKVEKGKSKKLKSVKELLGI
TIMERSSFEKNPIDFLEAKGYKEVKKDLIIKLPKYSLFELENGRKRMLASARELQKGNELAL
PSKYVNFLYLASHYEKLKGSPEDNEQKQLFVEQHKHYLDEIIEQISEFSKRVILADANLDKV
LSAYNKHRDKPIREQAENIIHLFTLTNLGAPAAFKYFDTTIDRKQYRSTKEVLDATLIHQSI
TGLYETRIDLSQLGGDEGADKRTADGSEFESPKKKRKV
07. monoABE8.1_bpNLS + Q154R
MSEVEFSHEYWMRHALTLAKRARDEREVPVGAVLVLNNRVIGEGWNRAIGLHDPTAHAEIMA
LRQGGLVMQNYRLIDATLYVTFEPCVMCAGAMIHSRIGRVVFGVRNAKTGAAGSLMDVLHYP
GMNHRVEITEGILADECAALLCYFFRMPRRVFNAQKKAQSSTDSGGSSGGSSGSETPGTSES
ATPESSGGSSGGSDKKYSIGLAIGTNSVGWAVITDEYKVPSKKFKVLGNTDRHSIKKNLIGA
LLFDSGETAEATRLKRTARRRYTRRKNRICYLQEIFSNEMAKVDDSFFHRLEESFLVEEDKK
HERHPIFGNIVDEVAYHEKYPTIYHLRKKLVDSTDKADLRLIYLALAHMIKFRGHFLIEGDL
NPDNSDVDKLFIQLVQTYNQLFEENPINASGVDAKAILSARLSKSRRLENLIAQLPGEKKNG
LFGNLIALSLGLTPNFKSNFDLAEDAKLQLSKDTYDDDLDNLLAQIGDQYADLFLAAKNLSD
AILLSDILRVNTEITKAPLSASMIKRYDEHHQDLTLLKALVRQQLPEKYKEIFFDQSKNGYA
GYIDGGASQEEFYKFIKPILEKMDGTEELLVKLNREDLLRKQRTFDNGSIPHQIHLGELHAI
LRRQEDFYPFLKDNREKIEKILTFRIPYYVGPLARGNSRFAWMTRKSEETITPWNFEEVVDK
GASAQSFIERMTNFDKNLPNEKVLPKHSLLYEYFTVYNELTKVKYVTEGMRKPAFLSGEQKK
AIVDLLFKTNRKVTVKQLKEDYFKKIECFDSVEISGVEDRFNASLGTYHDLLKIIKDKDFLD
NEENEDILEDIVLTLTLFEDREMIEERLKTYAHLFDDKVMKQLKRRRYTGWGRLSRKLINGI
RDKQSGKTILDFLKSDGFANRNFMQLIHDDSLTFKEDIQKAQVSGQGDSLHEHIANLAGSPA
IKKGILQTVKVVDELVKVMGRHKPENIVIEMARENQTTQKGQKNSRERMKRIEEGIKELGSQ
ILKEHPVENTQLQNEKLYLYYLQNGRDMYVDQELDINRLSDYDVDHIVPQSFLKDDSIDNKV
LTRSDKNRGKSDNVPSEEVVKKMKNYWRQLLNAKLITQRKFDNLTKAERGGLSELDKAGFIK
RQLVETRQITKHVAQILDSRMNTKYDENDKLIREVKVITLKSKLVSDFRKDFQFYKVREINN
YHHAHDAYLNAVVGTALIKKYPKLESEFVYGDYKVYDVRKMIAKSEQEIGKATAKYFFYSNI
MNFFKTEITLANGEIRKRPLIETNGETGEIVWDKGRDFATVRKVLSMPQVNIVKKTEVQTGG
FSKESILPKRNSDKLIARKKDWDPKKYGGFVSPTVAYSVLVVAKVEKGKSKKLKSVKELLGI
TIMERSSFEKNPIDFLEAKGYKEVKKDLIIKLPKYSLFELENGRKRMLASARELQKGNELAL
PSKYVNFLYLASHYEKLKGSPEDNEQKQLFVEQHKHYLDEIIEQISEFSKRVILADANLDKV
LSAYNKHRDKPIREQAENIIHLFTLTNLGAPAAFKYFDTTIDRKQYRSTKEVLDATLIHQSI
TGLYETRIDLSQLGGDEGADKRTADGSEFESPKKKRKV
08. monoABE8.1_bpNLS + Y147R_Q154R_Y123H
MSEVEFSHEYWMRHALTLAKRARDEREVPVGAVLVLNNRVIGEGWNRAIGLHDPTAHAEIMA
LRQGGLVMQNYRLIDATLYVTFEPCVMCAGAMIHSRIGRVVFGVRNAKTGAAGSLMDVLHHP
GMNHRVEITEGILADECAALLCRFFRMPRRVFNAQKKAQSSTDSGGSSGGSSGSETPGTSES
ATPESSGGSSGGSDKKYSIGLAIGTNSVGWAVITDEYKVPSKKFKVLGNTDRHSIKKNLIGA
LLFDSGETAEATRLKRTARRRYTRRKNRICYLQEIFSNEMAKVDDSFFHRLEESFLVEEDKK
HERHPIFGNIVDEVAYHEKYPTIYHLRKKLVDSTDKADLRLIYLALAHMIKFRGHFLIEGDL
NPDNSDVDKLFIQLVQTYNQLFEENPINASGVDAKAILSARLSKSRRLENLIAQLPGEKKNG
LFGNLIALSLGLTPNFKSNFDLAEDAKLQLSKDTYDDDLDNLLAQIGDQYADLFLAAKNLSD
AILLSDILRVNTEITKAPLSASMIKRYDEHHQDLTLLKALVRQQLPEKYKEIFFDQSKNGYA
GYIDGGASQEEFYKFIKPILEKMDGTEELLVKLNREDLLRKQRTFDNGSIPHQIHLGELHAI
LRRQEDFYPFLKDNREKIEKILTFRIPYYVGPLARGNSRFAWMTRKSEETITPWNFEEVVDK
GASAQSFIERMTNFDKNLPNEKVLPKHSLLYEYFTVYNELTKVKYVTEGMRKPAFLSGEQKK
AIVDLLFKTNRKVTVKQLKEDYFKKIECFDSVEISGVEDRFNASLGTYHDLLKIIKDKDFLD
NEENEDILEDIVLTLTLFEDREMIEERLKTYAHLFDDKVMKQLKRRRYTGWGRLSRKLINGI
RDKQSGKTILDFLKSDGFANRNFMQLIHDDSLTFKEDIQKAQVSGQGDSLHEHIANLAGSPA
IKKGILQTVKVVDELVKVMGRHKPENIVIEMARENQTTQKGQKNSRERMKRIEEGIKELGSQ
ILKEHPVENTQLQNEKLYLYYLQNGRDMYVDQELDINRLSDYDVDHIVPQSFLKDDSIDNKV
LTRSDKNRGKSDNVPSEEVVKKMKNYWRQLLNAKLITQRKFDNLTKAERGGLSELDKAGFIK
RQLVETRQITKHVAQILDSRMNTKYDENDKLIREVKVITLKSKLVSDFRKDFQFYKVREINN
YHHAHDAYLNAVVGTALIKKYPKLESEFVYGDYKVYDVRKMIAKSEQEIGKATAKYFFYSNI
MNFFKTEITLANGEIRKRPLIETNGETGEIVWDKGRDFATVRKVLSMPQVNIVKKTEVQTGG
FSKESILPKRNSDKLIARKKDWDPKKYGGFVSPTVAYSVLVVAKVEKGKSKKLKSVKELLGI
TIMERSSFEKNPIDFLEAKGYKEVKKDLIIKLPKYSLFELENGRKRMLASARELQKGNELAL
PSKYVNFLYLASHYEKLKGSPEDNEQKQLFVEQHKHYLDEIIEQISEFSKRVILADANLDKV
LSAYNKHRDKPIREQAENIIHLFTLTNLGAPAAFKYFDTTIDRKQYRSTKEVLDATLIHQSI
TGLYETRIDLSQLGGDEGADKRTADGSEFESPKKKRKV
09. monoABE8.1_bpNLS + Y147R_Q154R_176Y
MSEVEFSHEYWMRHALTLAKRARDEREVPVGAVLVLNNRVIGEGWNRAIGLHDPTAHAEIMA
LRQGGLVMQNYRLYDATLYVTFEPCVMCAGAMIHSRIGRVVFGVRNAKTGAAGSLMDVLHYP
GMNHRVEITEGILADECAALLCRFFRMPRRVFNAQKKAQSSTDSGGSSGGSSGSETPGTSES
ATPESSGGSSGGSDKKYSIGLAIGTNSVGWAVITDEYKVPSKKFKVLGNTDRHSIKKNLIGA
LLFDSGETAEATRLKRTARRRYTRRKNRICYLQEIFSNEMAKVDDSFFHRLEESFLVEEDKK
HERHPIFGNIVDEVAYHEKYPTIYHLRKKLVDSTDKADLRLIYLALAHMIKFRGHFLIEGDL
NPDNSDVDKLFIQLVQTYNQLFEENPINASGVDAKAILSARLSKSRRLENLIAQLPGEKKNG
LFGNLIALSLGLTPNFKSNFDLAEDAKLQLSKDTYDDDLDNLLAQIGDQYADLFLAAKNLSD
AILLSDILRVNTEITKAPLSASMIKRYDEHHQDLTLLKALVRQQLPEKYKEIFFDQSKNGYA
GYIDGGASQEEFYKFIKPILEKMDGTEELLVKLNREDLLRKQRTFDNGSIPHQIHLGELHAI
LRRQEDFYPFLKDNREKIEKILTFRIPYYVGPLARGNSRFAWMTRKSEETITPWNFEEVVDK
GASAQSFIERMTNFDKNLPNEKVLPKHSLLYEYFTVYNELTKVKYVTEGMRKPAFLSGEQKK
AIVDLLFKTNRKVTVKQLKEDYFKKIECFDSVEISGVEDRFNASLGTYHDLLKIIKDKDFLD
NEENEDILEDIVLTLTLFEDREMIEERLKTYAHLFDDKVMKQLKRRRYTGWGRLSRKLINGI
RDKQSGKTILDFLKSDGFANRNFMQLIHDDSLTFKEDIQKAQVSGQGDSLHEHIANLAGSPA
IKKGILQTVKVVDELVKVMGRHKPENIVIEMARENQTTQKGQKNSRERMKRIEEGIKELGSQ
ILKEHPVENTQLQNEKLYLYYLQNGRDMYVDQELDINRLSDYDVDHIVPQSFLKDDSIDNKV
LTRSDKNRGKSDNVPSEEVVKKMKNYWRQLLNAKLITQRKFDNLTKAERGGLSELDKAGFIK
RQLVETRQITKHVAQILDSRMNTKYDENDKLIREVKVITLKSKLVSDFRKDFQFYKVREINN
YHHAHDAYLNAVVGTALIKKYPKLESEFVYGDYKVYDVRKMIAKSEQEIGKATAKYFFYSNI
MNFFKTEITLANGEIRKRPLIETNGETGEIVWDKGRDFATVRKVLSMPQVNIVKKTEVQTGG
FSKESILPKRNSDKLIARKKDWDPKKYGGFVSPTVAYSVLVVAKVEKGKSKKLKSVKELLGI
TIMERSSFEKNPIDFLEAKGYKEVKKDLIIKLPKYSLFELENGRKRMLASARELQKGNELAL
PSKYVNFLYLASHYEKLKGSPEDNEQKQLFVEQHKHYLDEIIEQISEFSKRVILADANLDKV
LSAYNKHRDKPIREQAENIIHLFTLTNLGAPAAFKYFDTTIDRKQYRSTKEVLDATLIHQSI
TGLYETRIDLSQLGGDEGADKRTADGSEFESPKKKRKV
10. monoABE8.1_bpNLS + Y147R_Q154R_T166R
MSEVEFSHEYWMRHALTLAKRARDEREVPVGAVLVLNNRVIGEGWNRAIGLHDPTAHAEIMA
LRQGGLVMQNYRLIDATLYVTFEPCVMCAGAMIHSRIGRVVFGVRNAKTGAAGSLMDVLHYP
GMNHRVEITEGILADECAALLCRFFRMPRRVFNAQKKAQSSRDSGGSSGGSSGSETPGTSES
ATPESSGGSSGGSDKKYSIGLAIGTNSVGWAVITDEYKVPSKKFKVLGNTDRHSIKKNLIGA
LLFDSGETAEATRLKRTARRRYTRRKNRICYLQEIFSNEMAKVDDSFFHRLEESFLVEEDKK
HERHPIFGNIVDEVAYHEKYPTIYHLRKKLVDSTDKADLRLIYLALAHMIKFRGHFLIEGDL
NPDNSDVDKLFIQLVQTYNQLFEENPINASGVDAKAILSARLSKSRRLENLIAQLPGEKKNG
LFGNLIALSLGLTPNFKSNFDLAEDAKLQLSKDTYDDDLDNLLAQIGDQYADLFLAAKNLSD
AILLSDILRVNTEITKAPLSASMIKRYDEHHQDLTLLKALVRQQLPEKYKEIFFDQSKNGYA
GYIDGGASQEEFYKFIKPILEKMDGTEELLVKLNREDLLRKQRTFDNGSIPHQIHLGELHAI
LRRQEDFYPFLKDNREKIEKILTFRIPYYVGPLARGNSRFAWMTRKSEETITPWNFEEVVDK
GASAQSFIERMTNFDKNLPNEKVLPKHSLLYEYFTVYNELTKVKYVTEGMRKPAFLSGEQKK
AIVDLLFKTNRKVTVKQLKEDYFKKIECFDSVEISGVEDRFNASLGTYHDLLKIIKDKDFLD
NEENEDILEDIVLTLTLFEDREMIEERLKTYAHLFDDKVMKQLKRRRYTGWGRLSRKLINGI
RDKQSGKTILDFLKSDGFANRNFMQLIHDDSLTFKEDIQKAQVSGQGDSLHEHIANLAGSPA
IKKGILQTVKVVDELVKVMGRHKPENIVIEMARENQTTQKGQKNSRERMKRIEEGIKELGSQ
ILKEHPVENTQLQNEKLYLYYLQNGRDMYVDQELDINRLSDYDVDHIVPQSFLKDDSIDNKV
LTRSDKNRGKSDNVPSEEVVKKMKNYWRQLLNAKLITQRKFDNLTKAERGGLSELDKAGFIK
RQLVETRQITKHVAQILDSRMNTKYDENDKLIREVKVITLKSKLVSDFRKDFQFYKVREINN
YHHAHDAYLNAVVGTALIKKYPKLESEFVYGDYKVYDVRKMIAKSEQEIGKATAKYFFYSNI
MNFFKTEITLANGEIRKRPLIETNGETGEIVWDKGRDFATVRKVLSMPQVNIVKKTEVQTGG
FSKESILPKRNSDKLIARKKDWDPKKYGGFVSPTVAYSVLVVAKVEKGKSKKLKSVKELLGI
TIMERSSFEKNPIDFLEAKGYKEVKKDLIIKLPKYSLFELENGRKRMLASARELQKGNELAL
PSKYVNFLYLASHYEKLKGSPEDNEQKQLFVEQHKHYLDEIIEQISEFSKRVILADANLDKV
LSAYNKHRDKPIREQAENIIHLFTLTNLGAPAAFKYFDTTIDRKQYRSTKEVLDATLIHQSI
TGLYETRIDLSQLGGDEGADKRTADGSEFESPKKKRKV
11. monoABE8.1_bpNLS + Y147T_Q154R
MSEVEFSHEYWMRHALTLAKRARDEREVPVGAVLVLNNRVIGEGWNRAIGLHDPTAHAEIMA
LRQGGLVMQNYRLIDATLYVTFEPCVMCAGAMIHSRIGRVVFGVRNAKTGAAGSLMDVLHYP
GMNHRVEITEGILADECAALLCTFFRMPRRVFNAQKKAQSSTDSGGSSGGSSGSETPGTSES
ATPESSGGSSGGSDKKYSIGLAIGTNSVGWAVITDEYKVPSKKFKVLGNTDRHSIKKNLIGA
LLFDSGETAEATRLKRTARRRYTRRKNRICYLQEIFSNEMAKVDDSFFHRLEESFLVEEDKK
HERHPIFGNIVDEVAYHEKYPTIYHLRKKLVDSTDKADLRLIYLALAHMIKFRGHFLIEGDL
NPDNSDVDKLFIQLVQTYNQLFEENPINASGVDAKAILSARLSKSRRLENLIAQLPGEKKNG
LFGNLIALSLGLTPNFKSNFDLAEDAKLQLSKDTYDDDLDNLLAQIGDQYADLFLAAKNLSD
AILLSDILRVNTEITKAPLSASMIKRYDEHHQDLTLLKALVRQQLPEKYKEIFFDQSKNGYA
GYIDGGASQEEFYKFIKPILEKMDGTEELLVKLNREDLLRKQRTFDNGSIPHQIHLGELHAI
LRRQEDFYPFLKDNREKIEKILTFRIPYYVGPLARGNSRFAWMTRKSEETITPWNFEEVVDK
GASAQSFIERMTNFDKNLPNEKVLPKHSLLYEYFTVYNELTKVKYVTEGMRKPAFLSGEQKK
AIVDLLFKTNRKVTVKQLKEDYFKKIECFDSVEISGVEDRFNASLGTYHDLLKIIKDKDFLD
NEENEDILEDIVLTLTLFEDREMIEERLKTYAHLFDDKVMKQLKRRRYTGWGRLSRKLINGI
RDKQSGKTILDFLKSDGFANRNFMQLIHDDSLTFKEDIQKAQVSGQGDSLHEHIANLAGSPA
IKKGILQTVKVVDELVKVMGRHKPENIVIEMARENQTTQKGQKNSRERMKRIEEGIKELGSQ
ILKEHPVENTQLQNEKLYLYYLQNGRDMYVDQELDINRLSDYDVDHIVPQSFLKDDSIDNKV
LTRSDKNRGKSDNVPSEEVVKKMKNYWRQLLNAKLITQRKFDNLTKAERGGLSELDKAGFIK
RQLVETRQITKHVAQILDSRMNTKYDENDKLIREVKVITLKSKLVSDFRKDFQFYKVREINN
YHHAHDAYLNAVVGTALIKKYPKLESEFVYGDYKVYDVRKMIAKSEQEIGKATAKYFFYSNI
MNFFKTEITLANGEIRKRPLIETNGETGEIVWDKGRDFATVRKVLSMPQVNIVKKTEVQTGG
FSKESILPKRNSDKLIARKKDWDPKKYGGFVSPTVAYSVLVVAKVEKGKSKKLKSVKELLGI
TIMERSSFEKNPIDFLEAKGYKEVKKDLIIKLPKYSLFELENGRKRMLASARELQKGNELAL
PSKYVNFLYLASHYEKLKGSPEDNEQKQLFVEQHKHYLDEIIEQISEFSKRVILADANLDKV
LSAYNKHRDKPIREQAENIIHLFTLTNLGAPAAFKYFDTTIDRKQYRSTKEVLDATLIHQSI
TGLYETRIDLSQLGGDEGADKRTADGSEFESPKKKRKV
12. monoABE8.1_bpNLS + Y147T_Q154S
MSEVEFSHEYWMRHALTLAKRARDEREVPVGAVLVLNNRVIGEGWNRAIGLHDPTAHAEIMA
LRQGGLVMQNYRLIDATLYVTFEPCVMCAGAMIHSRIGRVVFGVRNAKTGAAGSLMDVLHYP
GMNHRVEITEGILADECAALLCTFFRMPRSVFNAQKKAQSSTDSGGSSGGSSGSETPGTSES
ATPESSGGSSGGSDKKYSIGLAIGTNSVGWAVITDEYKVPSKKFKVLGNTDRHSIKKNLIGA
LLFDSGETAEATRLKRTARRRYTRRKNRICYLQEIFSNEMAKVDDSFFHRLEESFLVEEDKK
HERHPIFGNIVDEVAYHEKYPTIYHLRKKLVDSTDKADLRLIYLALAHMIKFRGHFLIEGDL
NPDNSDVDKLFIQLVQTYNQLFEENPINASGVDAKAILSARLSKSRRLENLIAQLPGEKKNG
LFGNLIALSLGLTPNFKSNFDLAEDAKLQLSKDTYDDDLDNLLAQIGDQYADLFLAAKNLSD
AILLSDILRVNTEITKAPLSASMIKRYDEHHQDLTLLKALVRQQLPEKYKEIFFDQSKNGYA
GYIDGGASQEEFYKFIKPILEKMDGTEELLVKLNREDLLRKQRTFDNGSIPHQIHLGELHAI
LRRQEDFYPFLKDNREKIEKILTFRIPYYVGPLARGNSRFAWMTRKSEETITPWNFEEVVDK
GASAQSFIERMTNFDKNLPNEKVLPKHSLLYEYFTVYNELTKVKYVTEGMRKPAFLSGEQKK
AIVDLLFKTNRKVTVKQLKEDYFKKIECFDSVEISGVEDRFNASLGTYHDLLKIIKDKDFLD
NEENEDILEDIVLTLTLFEDREMIEERLKTYAHLFDDKVMKQLKRRRYTGWGRLSRKLINGI
RDKQSGKTILDFLKSDGFANRNFMQLIHDDSLTFKEDIQKAQVSGQGDSLHEHIANLAGSPA
IKKGILQTVKVVDELVKVMGRHKPENIVIEMARENQTTQKGQKNSRERMKRIEEGIKELGSQ
ILKEHPVENTQLQNEKLYLYYLQNGRDMYVDQELDINRLSDYDVDHIVPQSFLKDDSIDNKV
LTRSDKNRGKSDNVPSEEVVKKMKNYWRQLLNAKLITQRKFDNLTKAERGGLSELDKAGFIK
RQLVETRQITKHVAQILDSRMNTKYDENDKLIREVKVITLKSKLVSDFRKDFQFYKVREINN
YHHAHDAYLNAVVGTALIKKYPKLESEFVYGDYKVYDVRKMIAKSEQEIGKATAKYFFYSNI
MNFFKTEITLANGEIRKRPLIETNGETGEIVWDKGRDFATVRKVLSMPQVNIVKKTEVQTGG
FSKESILPKRNSDKLIARKKDWDPKKYGGFVSPTVAYSVLVVAKVEKGKSKKLKSVKELLGI
TIMERSSFEKNPIDFLEAKGYKEVKKDLIIKLPKYSLFELENGRKRMLASARELQKGNELAL
PSKYVNFLYLASHYEKLKGSPEDNEQKQLFVEQHKHYLDEIIEQISEFSKRVILADANLDKV
LSAYNKHRDKPIREQAENIIHLFTLTNLGAPAAFKYFDTTIDRKQYRSTKEVLDATLIHQSI
TGLYETRIDLSQLGGDEGADKRTADGSEFESPKKKRKV
13. monoABE8.1_bpNLS + H123Y123H_Y147R_Q154R_I76Y
MSEVEFSHEYWMRHALTLAKRARDEREVPVGAVLVLNNRVIGEGWNRAIGLHDPTAHAEIMA
LRQGGLVMQNYRLYDATLYVTFEPCVMCAGAMIHSRIGRVVFGVRNAKTGAAGSLMDVLHHP
GMNHRVEITEGILADECAALLCRFFRMPRRVFNAQKKAQSSTDSGGSSGGSSGSETPGTSES
ATPESSGGSSGGSDKKYSIGLAIGTNSVGWAVITDEYKVPSKKFKVLGNTDRHSIKKNLIGA
LLFDSGETAEATRLKRTARRRYTRRKNRICYLQEIFSNEMAKVDDSFFHRLEESFLVEEDKK
HERHPIFGNIVDEVAYHEKYPTIYHLRKKLVDSTDKADLRLIYLALAHMIKFRGHFLIEGDL
NPDNSDVDKLFIQLVQTYNQLFEENPINASGVDAKAILSARLSKSRRLENLIAQLPGEKKNG
LFGNLIALSLGLTPNFKSNFDLAEDAKLQLSKDTYDDDLDNLLAQIGDQYADLFLAAKNLSD
AILLSDILRVNTEITKAPLSASMIKRYDEHHQDLTLLKALVRQQLPEKYKEIFFDQSKNGYA
GYIDGGASQEEFYKFIKPILEKMDGTEELLVKLNREDLLRKQRTFDNGSIPHQIHLGELHAI
LRRQEDFYPFLKDNREKIEKILTFRIPYYVGPLARGNSRFAWMTRKSEETITPWNFEEVVDK
GASAQSFIERMTNFDKNLPNEKVLPKHSLLYEYFTVYNELTKVKYVTEGMRKPAFLSGEQKK
AIVDLLFKTNRKVTVKQLKEDYFKKIECFDSVEISGVEDRFNASLGTYHDLLKIIKDKDFLD
NEENEDILEDIVLTLTLFEDREMIEERLKTYAHLFDDKVMKQLKRRRYTGWGRLSRKLINGI
RDKQSGKTILDFLKSDGFANRNFMQLIHDDSLTFKEDIQKAQVSGQGDSLHEHIANLAGSPA
IKKGILQTVKVVDELVKVMGRHKPENIVIEMARENQTTQKGQKNSRERMKRIEEGIKELGSQ
ILKEHPVENTQLQNEKLYLYYLQNGRDMYVDQELDINRLSDYDVDHIVPQSFLKDDSIDNKV
LTRSDKNRGKSDNVPSEEVVKKMKNYWRQLLNAKLITQRKFDNLTKAERGGLSELDKAGFIK
RQLVETRQITKHVAQILDSRMNTKYDENDKLIREVKVITLKSKLVSDFRKDFQFYKVREINN
YHHAHDAYLNAVVGTALIKKYPKLESEFVYGDYKVYDVRKMIAKSEQEIGKATAKYFFYSNI
MNFFKTEITLANGEIRKRPLIETNGETGEIVWDKGRDFATVRKVLSMPQVNIVKKTEVQTGG
FSKESILPKRNSDKLIARKKDWDPKKYGGFVSPTVAYSVLVVAKVEKGKSKKLKSVKELLGI
TIMERSSFEKNPIDFLEAKGYKEVKKDLIIKLPKYSLFELENGRKRMLASARELQKGNELAL
PSKYVNFLYLASHYEKLKGSPEDNEQKQLFVEQHKHYLDEIIEQISEFSKRVILADANLDKV
LSAYNKHRDKPIREQAENIIHLFTLTNLGAPAAFKYFDTTIDRKQYRSTKEVLDATLIHQSI
TGLYETRIDLSQLGGDEGADKRTADGSEFESPKKKRKV
14. monoABE8.1_bpNLS + V82S + Q154R
MSEVEFSHEYWMRHALTLAKRARDEREVPVGAVLVLNNRVIGEGWNRAIGLHDPTAHAEIMA
LRQGGLVMQNYRLIDATLYSTFEPCVMCAGAMIHSRIGRVVFGVRNAKTGAAGSLMDVLHYP
GMNHRVEITEGILADECAALLCYFFRMPRRVFNAQKKAQSSTDSGGSSGGSSGSETPGTSES
ATPESSGGSSGGSDKKYSIGLAIGTNSVGWAVITDEYKVPSKKFKVLGNTDRHSIKKNLIGA
LLFDSGETAEATRLKRTARRRYTRRKNRICYLQEIFSNEMAKVDDSFFHRLEESFLVEEDKK
HERHPIFGNIVDEVAYHEKYPTIYHLRKKLVDSTDKADLRLIYLALAHMIKFRGHFLIEGDL
NPDNSDVDKLFIQLVQTYNQLFEENPINASGVDAKAILSARLSKSRRLENLIAQLPGEKKNG
LFGNLIALSLGLTPNFKSNFDLAEDAKLQLSKDTYDDDLDNLLAQIGDQYADLFLAAKNLSD
AILLSDILRVNTEITKAPLSASMIKRYDEHHQDLTLLKALVRQQLPEKYKEIFFDQSKNGYA
GYIDGGASQEEFYKFIKPILEKMDGTEELLVKLNREDLLRKQRTFDNGSIPHQIHLGELHAI
LRRQEDFYPFLKDNREKIEKILTFRIPYYVGPLARGNSRFAWMTRKSEETITPWNFEEVVDK
GASAQSFIERMTNFDKNLPNEKVLPKHSLLYEYFTVYNELTKVKYVTEGMRKPAFLSGEQKK
AIVDLLFKTNRKVTVKQLKEDYFKKIECFDSVEISGVEDRFNASLGTYHDLLKIIKDKDFLD
NEENEDILEDIVLTLTLFEDREMIEERLKTYAHLFDDKVMKQLKRRRYTGWGRLSRKLINGI
RDKQSGKTILDFLKSDGFANRNFMQLIHDDSLTFKEDIQKAQVSGQGDSLHEHIANLAGSPA
IKKGILQTVKVVDELVKVMGRHKPENIVIEMARENQTTQKGQKNSRERMKRIEEGIKELGSQ
ILKEHPVENTQLQNEKLYLYYLQNGRDMYVDQELDINRLSDYDVDHIVPQSFLKDDSIDNKV
LTRSDKNRGKSDNVPSEEVVKKMKNYWRQLLNAKLITQRKFDNLTKAERGGLSELDKAGFIK
RQLVETRQITKHVAQILDSRMNTKYDENDKLIREVKVITLKSKLVSDFRKDFQFYKVREINN
YHHAHDAYLNAVVGTALIKKYPKLESEFVYGDYKVYDVRKMIAKSEQEIGKATAKYFFYSNI
MNFFKTEITLANGEIRKRPLIETNGETGEIVWDKGRDFATVRKVLSMPQVNIVKKTEVQTGG
FSKESILPKRNSDKLIARKKDWDPKKYGGFVSPTVAYSVLVVAKVEKGKSKKLKSVKELLGI
TIMERSSFEKNPIDFLEAKGYKEVKKDLIIKLPKYSLFELENGRKRMLASARELQKGNELAL
PSKYVNFLYLASHYEKLKGSPEDNEQKQLFVEQHKHYLDEIIEQISEFSKRVILADANLDKV
LSAYNKHRDKPIREQAENIIHLFTLTNLGAPAAFKYFDTTIDRKQYRSTKEVLDATLIHQSI
TGLYETRIDLSQLGGDEGADKRTADGSEFESPKKKRKV

[0606] In some embodiments, the base editor is a fusion protein comprising a polynucleotide programmable nucleotide binding domain (e.g., Cas9-derived domain) fused to a nucleobase editing domain (e.g., all or a portion of a deaminase domain). In certain embodiments, the fusion proteins provided herein comprise one or more features that improve the base editing activity of the fusion proteins. For example, any of the fusion proteins provided herein may comprise a Cas9 domain that has reduced nuclease activity. In some embodiments, any of the fusion proteins provided herein may have a Cas9 domain that does not have nuclease activity (dCas9), or a Cas9 domain that cuts one strand of a duplexed DNA molecule, referred to as a Cas9 nickase (nCas9).

[0607] In some embodiments, the base editor further comprises a domain comprising all or a portion of a uracil glycosylase inhibitor (UGI). In some embodiments, the base editor comprises a domain comprising all or a portion of a uracil binding protein (UBP), such as a uracil DNA glycosylase (UDG). In some embodiments, the base editor comprises a domain comprising all or a portion of a nucleic acid polymerase. In some embodiments, a nucleic acid polymerase or portion thereof incorporated into a base editor is a translesion DNA polymerase.

[0608] In some embodiments, a domain of the base editor can comprise multiple domains. For example, the base editor comprising a polynucleotide programmable nucleotide binding domain derived from Cas9 can comprise an REC lobe and an NUC lobe corresponding to the REC lobe and NUC lobe of a wild-type or natural Cas9. In another example, the base editor can comprise one or more of a RuvCI domain, BH domain, REC1 domain, REC2 domain, RuvCII domain, L1 domain, HNH domain, L2 domain, RuvCIII domain, WED domain, TOPO domain or CTD domain. In some embodiments, one or more domains of the base editor comprise a mutation (e.g., substitution, insertion, deletion) relative to a wild-type version of a polypeptide comprising the domain. For example, an HNH domain of a polynucleotide programmable DNA binding domain can comprise an H840A substitution. In another example, a RuvCI domain of a polynucleotide programmable DNA binding domain can comprise a D1OA substitution.

[0609] Different domains (e.g., adjacent domains) of the base editor disclosed herein can be connected to each other with or without the use of one or more linker domains (e.g., an XTEN linker domain). In some embodiments, a linker domain can be a bond (e.g., covalent bond), chemical group, or a molecule linking two molecules or moieties, e.g., two domains of a fusion protein, such as, for example, a first domain (e.g., Cas9-derived domain) and a second domain (e.g., an adenosine deaminase domain). In some embodiments, a linker is a covalent bond (e.g., a carbon-carbon bond, disulfide bond, carbon-hetero atom bond, etc.). In certain embodiments, a linker is a carbon nitrogen bond of an amide linkage. In certain embodiments, a linker is a cyclic or acyclic, substituted or unsubstituted, branched or unbranched aliphatic or heteroaliphatic linker. In certain embodiments, a linker is polymeric (e.g., polyethylene, polyethylene glycol, polyamide, polyester, etc.). In certain embodiments, a linker comprises a monomer, dimer, or polymer of aminoalkanoic acid. In some embodiments, a linker comprises an aminoalkanoic acid (e.g., glycine, ethanoic acid, alanine, beta-alanine, 3-aminopropanoic acid, 4-aminobutanoic acid, 5-pentanoic acid, etc.). In some embodiments, a linker comprises a monomer, dimer, or polymer of aminohexanoic acid (Ahx). In certain embodiments, a linker is based on a carbocyclic moiety (e.g., cyclopentane, cyclohexane). In other embodiments, a linker comprises a polyethylene glycol moiety (PEG). In certain embodiments, a linker comprises an aryl or heteroaryl moiety. In certain embodiments, the linker is based on a phenyl ring. A linker can include functionalized moieties to facilitate attachment of a nucleophile (e.g., thiol, amino) from the peptide to the linker. Any electrophile can be used as part of the linker. Exemplary electrophiles include, but are not limited to, activated esters, activated amides, Michael acceptors, alkyl halides, aryl halides, acyl halides, and isothiocyanates. In some embodiments, a linker joins a gRNA binding domain of an RNA-programmable nuclease, including a Cas9 nuclease domain, and the catalytic domain of a nucleic acid editing protein. In some embodiments, a linker joins a dCas9 and a second domain (e.g., UGI, etc.).

[0610] Typically, a linker is positioned between, or flanked by, two groups, molecules, or other moieties and connected to each one via a covalent bond, thus connecting the two. In some embodiments, a linker is an amino acid or a plurality of amino acids (e.g., a peptide or protein). In some embodiments, a linker is an organic molecule, group, polymer, or chemical moiety. In some embodiments, a linker is 2-100 amino acids in length, for example, 2, 3, 4, 5, 6, 7, 8, 9, 10, 11, 12, 13, 14, 15, 16, 17, 18, 19, 20, 21, 22, 23, 24, 25, 26, 27, 28, 29, 30, 30-35, 35-40, 40-45, 45-50, 50-60, 60-70, 70-80, 80-90, 90-100, 100-150, or 150-200 amino acids in length. In some embodiments, the linker is about 3 to about 104 (e.g., 5, 6, 7, 8, 9, 10, 11, 12, 13, 14, 15, 16, 17, 18, 19, 20, 21, 22, 23, 24, 25, 26, 27, 28, 29, 30, 31, 32, 33, 34, 35, 36, 37, 38, 39, 40, 41, 42, 43, 44, 45, 46, 47, 48, 49, 50, 55, 60, 65, 70, 75, 80, 85, 90, 95, or 100) amino acids in length. Longer or shorter linkers are also contemplated. In some embodiments, a linker domain comprises the amino acid sequence SGSETPGTSESATPES, which can also be referred to as the XTEN linker. Any method for linking the fusion protein domains can be employed (e.g., ranging from very flexible linkers of the form (SGGS)n, (GGGS)n, (GGGGS)n, and (G)n, to more rigid linkers of the form (EAAAK)n, (GGS)n, SGSETPGTSESATPES (see, e.g., Guilinger J P, Thompson D B, Liu D R. Fusion of catalytically inactive Cas9 to FokI nuclease improves the specificity of genome modification. Nat. Biotechnol. 2014; 32(6): 577-82; the entire contents are incorporated herein by reference), or (XP)ₙ motif, in order to achieve the optimal length for activity for the nucleobase editor. In some embodiments, n is 1, 2, 3, 4, 5, 6, 7, 8, 9, 10, 11, 12, 13, 14, or 15. In some embodiments, the linker comprises a (GGS)ₙ motif, wherein n is 1, 3, or 7. In some embodiments, the Cas9 domain of the fusion proteins provided herein are fused via a linker comprising the amino acid sequence SGSETPGTSESATPES. In some embodiments, a linker comprises a plurality of proline residues and is 5-21, 5-14, 5-9, 5-7 amino acids in length, e.g., PAPAP, PAPAPA, PAPAPAP, PAPAPAPA, P(AP)₄, P(AP)₇, P(AP)₁₀ (see, e.g., Tan J, Zhang F, Karcher D, Bock R. Engineering of high-precision base editors for site-specific single nucleotide replacement. Nat Commun. 2019 Jan 25; 10(1):439; the entire contents are incorporated herein by reference). Such proline-rich linkers are also termed “rigid” linkers.

[0611] A fusion protein of the invention comprises a nucleic acid editing domain. In some embodiments, the deaminase is an adenosine deaminase. In some embodiments, the deaminase is a vertebrate deaminase. In some embodiments, the deaminase is an invertebrate deaminase. In some embodiments, the deaminase is a human, chimpanzee, gorilla, monkey, cow, dog, rat, or mouse deaminase. In some embodiments, the deaminase is a human deaminase. In some embodiments, the deaminase is a rat deaminase.

### Linkers

[0612] In certain embodiments, linkers may be used to link any of the peptides or peptide domains of the invention. The linker may be as simple as a covalent bond, or it may be a polymeric linker many atoms in length. In certain embodiments, the linker is a polypeptide or based on amino acids. In other embodiments, the linker is not peptide-like. In certain embodiments, the linker is a covalent bond (e.g., a carbon-carbon bond, disulfide bond, carbon-heteroatom bond, etc.). In certain embodiments, the linker is a carbon-nitrogen bond of an amide linkage. In certain embodiments, the linker is a cyclic or acyclic, substituted or unsubstituted, branched or unbranched aliphatic or heteroaliphatic linker. In certain embodiments, the linker is polymeric (e.g., polyethylene, polyethylene glycol, polyamide, polyester, etc.). In certain embodiments, the linker comprises a monomer, dimer, or polymer of aminoalkanoic acid. In certain embodiments, the linker comprises an aminoalkanoic acid (e.g., glycine, ethanoic acid, alanine, beta-alanine, 3-aminopropanoic acid, 4-aminobutanoic acid, 5-pentanoic acid, etc.). In certain embodiments, the linker comprises a monomer, dimer, or polymer of aminohexanoic acid (Ahx). In certain embodiments, the linker is based on a carbocyclic moiety (e.g., cyclopentane, cyclohexane). In other embodiments, the linker comprises a polyethylene glycol moiety (PEG). In other embodiments, the linker comprises amino acids. In certain embodiments, the linker comprises a peptide. In certain embodiments, the linker comprises an aryl or heteroaryl moiety. In certain embodiments, the linker is based on a phenyl ring. The linker may include functionalized moieties to facilitate attachment of a nucleophile (e.g., thiol, amino) from the peptide to the linker. Any electrophile may be used as part of the linker. Exemplary electrophiles include, but are not limited to, activated esters, activated amides, Michael acceptors, alkyl halides, aryl halides, acyl halides, and isothiocyanates.

[0613] In some embodiments, the linker is an amino acid or a plurality of amino acids (e.g., a peptide or protein). In some embodiments, the linker is a bond (e.g., a covalent bond), an organic molecule, group, polymer, or chemical moiety. In some embodiments, the linker is about 3 to about 104 (e.g., 5, 6, 7, 8, 9, 10, 11, 12, 13, 14, 15, 16, 17, 18, 19, 20, 21, 22, 23, 24, 25, 26, 27, 28, 29, 30, 31, 32, 33, 34, 35, 36, 37, 38, 39, 40, 41, 42, 43, 44, 45, 46, 47, 48, 49, 50, 55, 60, 65, 70, 75, 80, 85, 90, 95, or 100) amino acids in length.

[0614] In some embodiments, the adenosine deaminase and the napDNAbp are fused via a linker that is 4, 16, 32, or 104 amino acids in length. In some embodiments, the linker is about 3 to about 104 amino acids in length. In some embodiments, any of the fusion proteins provided herein, comprise an adenosine deaminase and a Cas9 domain that are fused to each other via a linker. Various linker lengths and flexibilities between the deaminase domain (e.g., an engineered ecTadA) and the Cas9 domain can be employed (e.g., ranging from very flexible linkers of the form (GGGS)ₙ, (GGGGS)ₙ, and (G)ₙ, to more rigid linkers of the form (EAAAK)ₙ, (SGGS)ₙ, SGSETPGTSESATPES (see, e.g., Guilinger J P, Thompson D B, Liu D R. Fusion of catalytically inactive Cas9 to FokI nuclease improves the specificity of genome modification. Nat. Biotechnol. 2014; 32(6): 577-82; the entire contents are incorporated herein by reference) and (XP)ₙ) in order to achieve the optimal length for activity for the nucleobase editor. In some embodiments, n is 1, 2, 3, 4, 5, 6, 7, 8, 9, 10, 11, 12, 13, 14, or 15. In some embodiments, the linker comprises a (GGS)ₙ, motif, wherein n is 1, 3, or 7. In some embodiments, the adenosine deaminase and the Cas9 domain of any of the fusion proteins provided herein are fused via a linker (e.g., an XTEN linker) comprising the amino acid sequence SGSETPGTSESATPES.

Cas9 Complexes with Guide RNAs

[0615] Some aspects of this disclosure provide complexes comprising any of the fusion proteins provided herein, and a guide RNA (e.g., a guide that targets an G6PC allele bearing GSD1a targetable mutation) bound to a CAS9 domain (e.g., a dCas9, a nuclease active Cas9, or a Cas9 nickase) of fusion protein. Any method for linking the fusion protein domains can be employed (e.g., ranging from very flexible linkers of the form (GGGS)ₙ, (GGGGS)ₙ, and (G)ₙ to more rigid linkers of the form (EAAAK)ₙ, (SGGS)ₙ, SGSETPGTSESATPES (see, e.g., Guilinger J P, Thompson D B, Liu D R. Fusion of catalytically inactive Cas9 to FokI nuclease improves the specificity of genome modification. Nat. Biotechnol. 2014; 32(6): 577-82; the entire contents are incorporated herein by reference) and (XP)ₙ) in order to achieve the optimal length for activity for the nucleobase editor. In some embodiments, n is 1, 2, 3, 4, 5, 6, 7, 8, 9, 10, 11, 12, 13, 14, or 15. In some embodiments, the linker comprises a (GGS)ₙ motif, wherein n is 1, 3, or 7. In some embodiments, the Cas9 domain of the fusion proteins provided herein are fused via a linker comprising the amino acid sequence SGSETPGTSESATPES.

[0616] In some embodiments, the guide nucleic acid (e.g., guide RNA) is from 15-100 nucleotides long and comprises a sequence of at least 10 contiguous nucleotides that is complementary to a target sequence. In some embodiments, the guide RNA is 15, 16, 17, 18, 19, 20, 21, 22, 23, 24, 25, 26, 27, 28, 29, 30, 31, 32, 33, 34, 35, 36, 37, 38, 39, 40, 41, 42, 43, 44, 45, 46, 47, 48, 49, or 50 nucleotides long. In some embodiments, the guide RNA comprises a sequence of 15, 16, 17, 18, 19, 20, 21, 22, 23, 24, 25, 26, 27, 28, 29, 30, 31, 32, 33, 34, 35, 36, 37, 38, 39, or 40 contiguous nucleotides that is complementary to a target sequence. In some embodiments, the target sequence is a DNA sequence. In some embodiments, the target sequence is a sequence in the genome of a bacteria, yeast, fungi, insect, plant, or animal. In some embodiments, the target sequence is a sequence in the genome of a human. In some embodiments, the 3′ end of the target sequence is immediately adjacent to a canonical PAM sequence (NGG). In some embodiments, the 3′ end of the target sequence is immediately adjacent to a non-canonical PAM sequence (e.g., a sequence listed in Table 2 or 5′-NAA-3′). In some embodiments, the guide nucleic acid (e.g., guide RNA) is complementary to a sequence in G6PC allele bearing GSD1a targetable mutations.

[0617] Some aspects of this disclosure provide methods of using the fusion proteins, or complexes provided herein. For example, some aspects of this disclosure provide methods comprising contacting a DNA molecule with any of the fusion proteins provided herein, and with at least one guide RNA, wherein the guide RNA is about 15-100 nucleotides long and comprises a sequence of at least 10 contiguous nucleotides that is complementary to a target sequence. In some embodiments, the 3′ end of the target sequence is immediately adjacent to an AGC, GAG, TTT, GTG, or CAA sequence. In some embodiments, the 3′ end of the target sequence is immediately adjacent to an NGA, NGCG, NGN, NNGRRT, NNNRRT, NGCG, NGCN, NGTN, NGTN, NGTN, or 5′ (TTTV) sequence.

[0618] It will be understood that the numbering of the specific positions or residues in the respective sequences depends on the particular protein and numbering scheme used. Numbering might be different, e.g., in precursors of a mature protein and the mature protein itself, and differences in sequences from species to species may affect numbering. One of skill in the art will be able to identify the respective residue in any homologous protein and in the respective encoding nucleic acid by methods well known in the art, e.g., by sequence alignment and determination of homologous residues.

[0619] It will be apparent to those of skill in the art that in order to target any of the fusion proteins disclosed herein, to a target site, e.g., a site comprising a mutation to be edited, it is typically necessary to co-express the fusion protein together with a guide RNA. As explained in more detail elsewhere herein, a guide RNA typically comprises a tracrRNA framework allowing for Cas9 binding, and a guide sequence, which confers sequence specificity to the Cas9:nucleic acid editing enzyme/domain fusion protein. Alternatively, the guide RNA and tracrRNA may be provided separately, as two nucleic acid molecules. In some embodiments, the guide RNA comprises a structure, wherein the guide sequence comprises a sequence that is complementary to the target sequence. The guide sequence is typically 20 nucleotides long. The sequences of suitable guide RNAs for targeting Cas9:nucleic acid editing enzyme/domain fusion proteins to specific genomic target sites will be apparent to those of skill in the art based on the instant disclosure. Such suitable guide RNA sequences typically comprise guide sequences that are complementary to a nucleic sequence within 50 nucleotides upstream or downstream of the target nucleotide to be edited. Some exemplary guide RNA sequences suitable for targeting any of the provided fusion proteins to specific target sequences are provided herein.

Cas12 Complexes with Guide RNAs

[0620] Some aspects of this disclosure provide complexes comprising any of the fusion proteins provided herein, and a guide RNA (e.g., a guide that targets a target polynucleotide for editing).

[0621] In some embodiments, the guide nucleic acid (e.g., guide RNA) is from 15-100 nucleotides long and comprises a sequence of at least 10 contiguous nucleotides that is complementary to a target sequence. In some embodiments, the guide RNA is 15, 16, 17, 18, 19, 20, 21, 22, 23, 24, 25, 26, 27, 28, 29, 30, 31, 32, 33, 34, 35, 36, 37, 38, 39, 40, 41, 42, 43, 44, 45, 46, 47, 48, 49, or 50 nucleotides long. In some embodiments, the guide RNA comprises a sequence of 15, 16, 17, 18, 19, 20, 21, 22, 23, 24, 25, 26, 27, 28, 29, 30, 31, 32, 33, 34, 35, 36, 37, 38, 39, or 40 contiguous nucleotides that is complementary to a target sequence. In some embodiments, the target sequence is a DNA sequence. In some embodiments, the target sequence is a sequence in the genome of a bacteria, yeast, fungi, insect, plant, or animal. In some embodiments, the target sequence is a sequence in the genome of a human. In some embodiments, the 3′ end of the target sequence is immediately adjacent to a canonical PAM sequence. In some embodiments, the 3′ end of the target sequence is immediately adjacent to a non-canonical PAM sequence.

[0622] Some aspects of this disclosure provide methods of using the fusion proteins, or complexes provided herein. For example, some aspects of this disclosure provide methods comprising contacting a DNA molecule with any of the fusion proteins provided herein, and with at least one guide RNA, wherein the guide RNA is about 15-100 nucleotides long and comprises a sequence of at least 10 contiguous nucleotides that is complementary to a target sequence. In some embodiments, the 3′ end of the target sequence is immediately adjacent to an e.g., TTN, DTTN, GTTN, ATTN, ATTC, DTTNT, WTTN, HATY, TTTN, TTTV, TTTC, TG, RTR, or YTN PAM site.

[0623] It will be understood that the numbering of the specific positions or residues in the respective sequences depends on the particular protein and numbering scheme used. Numbering might be different, e.g., in precursors of a mature protein and the mature protein itself, and differences in sequences from species to species may affect numbering. One of skill in the art will be able to identify the respective residue in any homologous protein and in the respective encoding nucleic acid by methods well known in the art, e.g., by sequence alignment and determination of homologous residues.

[0624] It will be apparent to those of skill in the art that in order to target any of the fusion proteins disclosed herein, to a target site, e.g., a site comprising a mutation to be edited, it is typically necessary to co-express the fusion protein together with a guide RNA. As explained in more detail elsewhere herein, a guide RNA typically comprises a tracrRNA framework allowing for Cas12 binding, and a guide sequence, which confers sequence specificity to the Cas12:nucleic acid editing enzyme/domain fusion protein. Alternatively, the guide RNA and tracrRNA may be provided separately, as two nucleic acid molecules. In some embodiments, the guide RNA comprises a structure, wherein the guide sequence comprises a sequence that is complementary to the target sequence. The guide sequence is typically 20 nucleotides long. The sequences of suitable guide RNAs for targeting Cas12:nucleic acid editing enzyme/domain fusion proteins to specific genomic target sites will be apparent to those of skill in the art based on the instant disclosure. Such suitable guide RNA sequences typically comprise guide sequences that are complementary to a nucleic sequence within 50 nucleotides upstream or downstream of the target nucleotide to be edited. Some exemplary guide RNA sequences suitable for targeting any of the provided fusion proteins to specific target sequences are provided herein.

[0625] The domains of the base editor disclosed herein can be arranged in any order as long as the deaminase domain is internalized in the Cas12 protein. Non-limiting examples of a base editor comprising a fusion protein comprising e.g., a Cas12 domain and a deaminase domain can be arranged as following:
[0626] NH2-[Cas12 domain]-Linkerl-[ABE8]-Linker2-[Cas12 domain]-COOH;
[0627] NH2-[Cas12 domain]-Linkerl-[ABE8]-[Cas12 domain]-COOH;
[0628] NH2-[Cas12 domain]-[ABE8]-Linker2-[Cas12 domain]-COOH;
[0629] NH2-[Cas12 domain]-[ABE8]-[Cas12 domain]-COOH;
[0630] NH2-[Cas12 domain]-Linkerl-[ABE8]-Linker2-[Cas12 domain]-[inosine BER inhibitor]-COOH;
[0631] NH2-[Cas12 domain]-Linkerl-[ABE8]-[Cas12 domain]-[inosine BER inhibitor]-COOH;
[0632] NH2-[Cas12 domain]-[ABE8]-Linker2-[Cas12 domain]-[inosine BER inhibitor]-COOH;
[0633] NH2-[Cas12 domain]-[ABE8]-[Cas12 domain]-[inosine BER inhibitor]-COOH;
[0634] NH2-[inosine BER inhibitor]-[Cas12 domain]-Linkerl-[ABE8]-Linker2-[Cas12 domain]-COOH;
[0635] NH2-[inosine BER inhibitor]-[Cas12 domain]-Linkerl-[ABE8]-[Cas12 domain]-COOH;
[0636] NH2-[inosine BER inhibitor]-[Cas12 domain]-[ABE8]-Linker2-[Cas12 domain]-COOH;
[0637] NH2-[inosine BER inhibitor]NH2-[Cas12 domain]-[ABE8]-[Cas12 domain]-COOH;

[0638] Additionally, in some cases, a Gam protein can be fused to an N terminus of a base editor. In some cases, a Gam protein can be fused to a C terminus of a base editor. The Gam protein of bacteriophage Mu can bind to the ends of double strand breaks (DSBs) and protect them from degradation. In some embodiments, using Gam to bind the free ends of DSB can reduce indel formation during the process of base editing. In some embodiments, 174-residue Gam protein is fused to the N terminus of the base editors. See. Komor, A. C., et al., “Improved base excision repair inhibition and bacteriophage Mu Gam protein yields C:G-to-T:A base editors with higher efficiency and product purity” Science Advances 3:eaao4774 (2017). In some cases, a mutation or mutations can change the length of a base editor domain relative to a wild type domain. For example, a deletion of at least one amino acid in at least one domain can reduce the length of the base editor. In another case, a mutation or mutations do not change the length of a domain relative to a wild type domain. For example, substitution(s) in any domain does/do not change the length of the base editor. Non-limiting examples of such base editors, where the length of all the domains is the same as the wild type domains, can include:
[0639] NH2-[Cas12 domain]-Linkerl-[APOBEC1]-Linker2-[Cas12 domain]-COOH;
[0640] NH2-[Cas12 domain]-Linkerl-[APOBEC1]-[Cas12 domain]-COOH;
[0641] NH2-[Cas12 domain]-[APOBEC1]-Linker2-[Cas12 domain]-COOH;
[0642] NH2-[Cas12 domain]-[APOBEC1]-[Cas12 domain]-COOH;
[0643] NH2-[Cas12 domain]-Linkerl-[APOBEC1]-Linker2-[Cas12 domain]-[UGI]-COOH;
[0644] NH2-[Cas12 domain]-Linkerl-[APOBEC1]-[Cas12 domain]-[UGI]-COOH;
[0645] NH2-[Cas12 domain]-[APOBEC1]-Linker2-[Cas12 domain]-[UGI]-COOH;
[0646] NH2-[Cas12 domain]-[APOBEC1]-[Cas12 domain]-[UGI]-COOH;
[0647] NH2-[UGI][Cas12 domain]-Linkerl-[APOBEC1]-Linker2-[Cas12 domain]-COOH;
[0648] NH2-[UGI][Cas12 domain]-Linkerl-[APOBEC1]-[Cas12 domain]-COOH;
[0649] NH2-[UGI][Cas12 domain]-[APOBEC1]-Linker2-[Cas12 domain]-COOH;
[0650] NH2-[UGI][Cas12 domain]-[APOBEC1]-[Cas12 domain]-COOH;

[0651] In some embodiments, the base editing fusion proteins provided herein need to be positioned at a precise location, for example, where a target base is placed within a defined region (e.g., a “deamination window”). In some cases, a target can be within a 4-base region. In some cases, such a defined target region can be approximately 15 bases upstream of the PAM. See Komor, A. C., et al., “Programmable editing of a target base in genomic DNA without double-stranded DNA cleavage” Nature 533, 420-424 (2016); Gaudelli, N. M., et al., “Programmable base editing of A•T to G•C in genomic DNA without DNA cleavage” Nature 551, 464-471 (2017); and Komor, A. C., et al., “Improved base excision repair inhibition and bacteriophage Mu Gam protein yields C:G-to-T:A base editors with higher efficiency and product purity” Science Advances 3:eaao4774 (2017), the entire contents of which are hereby incorporated by reference.

[0652] A defined target region can be a deamination window. A deamination window can be the defined region in which a base editor acts upon and deaminates a target nucleotide. In some embodiments, the deamination window is within a 2, 3, 4, 5, 6, 7, 8, 9, or 10 base regions. In some embodiments, the deamination window is 5, 6, 7, 8, 9, 10, 11, 12, 13, 14, 15, 16, 17, 18, 19, 20, 21, 22, 23, 24, or 25 bases upstream of the PAM.

[0653] The base editors of the present disclosure can comprise any domain, feature or amino acid sequence which facilitates the editing of a target polynucleotide sequence. For example, in some embodiments, the base editor comprises a nuclear localization sequence (NLS). In some embodiments, an NLS of the base editor is localized between a deaminase domain and a napDNAbp domain. In some embodiments, an NLS of the base editor is localized C-terminal to a napDNAbp domain.

[0654] Protein domains included in the fusion protein can be a heterologous functional domain. Non-limiting examples of protein domains which can be included in the fusion protein include a deaminase domain (e.g., cytidine deaminase and/or adenosine deaminase), a uracil glycosylase inhibitor (UGI) domain, epitope tags, and reporter gene sequences. Protein domains can be a heterologous functional domain, for example, having one or more of the following activities: transcriptional activation activity, transcriptional repression activity, transcription release factor activity, gene silencing activity, chromatin modifying activity, epigenetic modifying activity, histone modification activity, RNA cleavage activity, and nucleic acid binding activity. Such heterologous functional domains can confer a function activity, such as modification of a target polypeptide associated with target DNA (e.g., a histone, a DNA binding protein, etc.), leading to, for example, histone methylation, histone acetylation, histone ubiquitination, and the like. Other functions and/or activities conferred can include transposase activity, integrase activity, recombinase activity, ligase activity, ubiquitin ligase activity, deubiquitinating activity, adenylation activity, deadenylation activity, SUMOylation activity, deSUMOylation activity, or any combination of the above.

[0655] A domain may be detected or labeled with an epitope tag, a reporter protein, other binding domains. Non-limiting examples of epitope tags include histidine (His) tags, V5 tags, FLAG tags, influenza hemagglutinin (HA) tags, Myc tags, VSV-G tags, and thioredoxin (Trx) tags. Examples of reporter genes include, but are not limited to, glutathione-5-transferase (GST), horseradish peroxidase (HRP), chloramphenicol acetyltransferase (CAT) beta-galactosidase, beta-glucuronidase, luciferase, green fluorescent protein (GFP), HcRed, DsRed, cyan fluorescent protein (CFP), yellow fluorescent protein (YFP), and autofluorescent proteins including blue fluorescent protein (BFP). Additional protein sequences can include amino acid sequences that bind DNA molecules or bind other cellular molecules, including but not limited to maltose binding protein (MBP), S-tag, Lex A DNA binding domain (DBD) fusions, GAL4 DNA binding domain fusions, and herpes simplex virus (HSV) BP16 protein fusions.

[0656] In some embodiments, BhCas12b guide polynucleotide has the following sequence:

BhCas12b sgRNA scaffold (underlined) + 20 nt to
23 nt guide sequence (denoted by Nₙ)
5′GUUCUGTCUUUUGGUCAGGACAACCGUCUAGCUAUAAGUGCUGCAGGG
UGUGAGAAACUCCUAUUGCUGGACGAUGUCUCUUACGAGGCAUUAGCACN
NNNNNNNNNNNNNNNNNNN-3′

[0657] In some embodiments, BvCas12b and AaCas12b guide polynucleotides have the following sequences:

ByCas12b sgRNA scaffold (underlined) + 20 nt to
23 nt guide sequence (denoted by Nₙ)
5′GACCUAUAGGGUCAAUGAAUCUGUGCGUGUGCCAUAAGUAAUUAAAAA
UUACCCACCACAGGAGCACCUGAAAACAGGUGCUUGGCACNNNNNNNNNN
NNNNNNNNNN-3′
AaCas12b sgRNA scaffold (underlined) + 20 nt to
23 nt guide sequence (denoted by Nₙ)
5′GUCUAAAGGACAGAAUUUUUCAACGGGUGUGCCAAUGGCCACUUUCCA
GGUGGCAAAGCCCGUUGAACUUCUCAAAAAGAACGAUCUGAGAAGUGGCA
CNNNNNNNNNNNNNNNNNNNN-3′

### Methods of Using Fusion Proteins Comprising Adenosine Deaminase Variant and a Cas9 Domain

[0658] Some aspects of this disclosure provide methods of using the fusion proteins, or complexes provided herein. For example, some aspects of this disclosure provide methods comprising contacting a DNA molecule encoding a mutant form of a protein with any of the fusion proteins provided herein, and with at least one guide RNA, wherein the guide RNA is about 15-100 nucleotides long and comprises a sequence of at least 10 contiguous nucleotides that is complementary to a target sequence. In some embodiments, the 3′ end of the target sequence is immediately adjacent to a canonical PAM sequence (NGG). In some embodiments, the 3′ end of the target sequence is not immediately adjacent to a canonical PAM sequence (NGG). In some embodiments, the 3′ end of the target sequence is immediately adjacent to an AGC, GAG, TTT, GTG, or CAA sequence. In some embodiments, the 3′ end of the target sequence is immediately adjacent to an NGA, NGCG, NGN, NNGRRT, NNNRRT, NGCG, NGCN, NGTN, NGTN, NGTN, or 5′ (TTTV) sequence.

[0659] It will be understood that the numbering of the specific positions or residues in the respective sequences depends on the particular protein and numbering scheme used. Numbering might be different, e.g., in precursors of a mature protein and the mature protein itself, and differences in sequences from species to species may affect numbering. One of skill in the art will be able to identify the respective residue in any homologous protein and in the respective encoding nucleic acid by methods well known in the art, e.g., by sequence alignment and determination of homologous residues.

[0660] It will be apparent to those of skill in the art that in order to target any of the fusion proteins comprising a Cas9 domain and an adenosine deaminase variant (e.g., ABE8), as disclosed herein, to a target site, e.g., a site comprising a mutation to be edited, it is typically necessary to co-express the fusion protein together with a guide RNA, e.g., an sgRNA. As explained in more detail elsewhere herein, a guide RNA typically comprises a tracrRNA framework allowing for Cas9 binding, and a guide sequence, which confers sequence specificity to the Cas9:nucleic acid editing enzyme/domain fusion protein. Alternatively, the guide RNA and tracrRNA may be provided separately, as two nucleic acid molecules. In some embodiments, the guide RNA comprises a structure, wherein the guide sequence comprises a sequence that is complementary to the target sequence. The guide sequence is typically 20 nucleotides long. The sequences of suitable guide RNAs for targeting Cas9:nucleic acid editing enzyme/domain fusion proteins to specific genomic target sites will be apparent to those of skill in the art based on the instant disclosure. Such suitable guide RNA sequences typically comprise guide sequences that are complementary to a nucleic sequence within 50 nucleotides upstream or downstream of the target nucleotide to be edited. Some exemplary guide RNA sequences suitable for targeting any of the provided fusion proteins to specific target sequences are provided herein.

### Base Editor Efficiency

[0661] CRISPR-Cas9 nucleases have been widely used to mediate targeted genome editing. In most genome editing applications, Cas9 forms a complex with a guide polynucleotide (e.g., single guide RNA (sgRNA)) and induces a double-stranded DNA break (DSB) at the target site specified by the sgRNA sequence. Cells primarily respond to this DSB through the non-homologous end-joining (NHEJ) repair pathway, which results in stochastic insertions or deletions (indels) that can cause frameshift mutations that disrupt the gene. In the presence of a donor DNA template with a high degree of homology to the sequences flanking the DSB, gene correction can be achieved through an alternative pathway known as homology directed repair (HDR). Unfortunately, under most non-perturbative conditions, HDR is inefficient, dependent on cell state and cell type, and dominated by a larger frequency of indels. As most of the known genetic variations associated with human disease are point mutations, methods that can more efficiently and cleanly make precise point mutations are needed. Base editing systems as provided herein provide a new way to provide genome editing without generating double-strand DNA breaks, without requiring a donor DNA template, and without inducing an excess of stochastic insertions and deletions.

[0662] The base editors of the invention advantageously modify a specific nucleotide base encoding a protein comprising a mutation without generating a significant proportion of indels. The term “indel,” as used herein, refers to the insertion or deletion of a nucleotide base within a nucleic acid. Such insertions or deletions can lead to frame shift mutations within a coding region of a gene. In some embodiments, it is desirable to generate base editors that efficiently modify (e.g. mutate or deaminate) a specific nucleotide within a nucleic acid, without generating a large number of insertions or deletions (i.e., indels) in the targe nucleic acid sequence. In certain embodiments, any of the base editors provided herein are capable of generating a greater proportion of intended modifications (e.g., point mutations or deaminations) versus indels.

[0663] In some embodiments, any of base editor systems provided herein result in less than 50%, less than 40%, less than 30%, less than 20%, less than 19%, less than 18%, less than 17%, less than 16%, less than 15%, less than 14%, less than 13%, less than 12%, less than 11%, less than 10%, less than 9%, less than 8%, less than 7%, less than 6%, less than 5%, less than 4%, less than 3%, less than 2%, less than 1%, less than 0.9%, less than 0.8%, less than 0.7%, less than 0.6%, less than 0.5%, less than 0.4%, less than 0.3%, less than 0.2%, less than 0.1%, less than 0.09%, less than 0.08%, less than 0.07%, less than 0.06%, less than 0.05%, less than 0.04%, less than 0.03%, less than 0.02%, or less than 0.01% indel formation in the target polynucleotide sequence.

[0664] In some embodiments, any of base editor systems comprising one of the ABE8 base editor variants described herein result in less than 50%, less than 40%, less than 30%, less than 20%, less than 19%, less than 18%, less than 17%, less than 16%, less than 15%, less than 14%, less than 13%, less than 12%, less than 11%, less than 10%, less than 9%, less than 8%, less than 7%, less than 6%, less than 5%, less than 4%, less than 3%, less than 2%, less than 1%, less than 0.9%, less than 0.8%, less than 0.7%, less than 0.6%, less than 0.5%, less than 0.4%, less than 0.3%, less than 0.2%, less than 0.1%, less than 0.09%, less than 0.08%, less than 0.07%, less than 0.06%, less than 0.05%, less than 0.04%, less than 0.03%, less than 0.02%, or less than 0.01% indel formation in the target polynucleotide sequence. In some embodiments, any of base editor systems comprising one of the ABE8 base editor variants described herein result in less than 0.8% indel formation in the target polynucleotide sequence. In some embodiments, any of base editor systems comprising one of the ABE8 base editor variants described herein result in at most 0.8% indel formation in the target polynucleotide sequence. In some embodiments, any of base editor systems comprising one of the ABE8 base editor variants described herein result in less than 0.3% indel formation in the target polynucleotide sequence. In some embodiments, any of base editor systems comprising one of the ABE8 base editor variants described results in lower indel formation in the target polynucleotide sequence compared to a base editor system comprising one of ABE7 base editors. In some embodiments, any of base editor systems comprising one of the ABE8 base editor variants described herein results in lower indel formation in the target polynucleotide sequence compared to a base editor system comprising an ABE7.10.

[0665] In some embodiments, any of base editor systems comprising one of the ABE8 base editor variants described herein has reduction in indel frequency compared to a base editor system comprising one of the ABE7 base editors. In some embodiments, any of base editor systems comprising one of the ABE8 base editor variants described herein has at least 0.01%, at least 1%, at least 2%, at least 3%, at least 4%, at least 5%, at least 10%, at least 15%, at least 20%, at least 25%, at least 30%, at least 35%, at least 40%, at least 45%, at least 50%, at least 55%, at least 60%, at least 65%, at least 70%, at least 75%, at least 80%, at least 85%, at least 90%, or at least 95% reduction in indel frequency compared to a base editor system comprising one of the ABE7 base editors. In some embodiments, a base editor system comprising one of the ABE8 base editor variants described herein has at least 0.01%, at least 1%, at least 2%, at least 3%, at least 4%, at least 5%, at least 10%, at least 15%, at least 20%, at least 25%, at least 30%, at least 35%, at least 40%, at least 45%, at least 50%, at least 55%, at least 60%, at least 65%, at least 70%, at least 75%, at least 80%, at least 85%, at least 90%, or at least 95% reduction in indel frequency compared to a base editor system comprising an ABE7.10.

[0666] The invention provides adenosine deaminase variants (e.g., ABE8 variants) that have increased efficiency and specificity. In particular, the adenosine deaminase variants described herein are more likely to edit a desired base within a polynucleotide, and are less likely to edit bases that are not intended to be altered (e.g., “bystanders”).

[0667] In some embodiments, any of the base editing system comprising one of the ABE8 base editor variants described herein has reduced bystander editing or mutations. In some embodiments, an unintended editing or mutation is a bystander mutation or bystander editing, for example, base editing of a target base (e.g., A or C) in an unintended or non-target position in a target window of a target nucleotide sequence. In some embodiments, any of the base editing system comprising one of the ABE8 base editor variants described herein has reduced bystander editing or mutations compared to a base editor system comprising an ABE7 base editor, e.g., ABE7.10. In some embodiments, any of the base editing system comprising one of the ABE8 base editor variants described herein has reduced bystander editing or mutations by at least 1%, at least 2%, at least 3%, at least 4%, at least 5%, at least 10%, at least 15%, at least 20%, at least 25%, at least 30%, at least 35%, at least 40%, at least 45%, at least 50%, at least 55%, at least 60%, at least 65%, at least 70%, at least 75%, at least 80%, at least 85%, at least 90%, at least 95%, or at least 99% compared to a base editor system comprising an ABE7 base editor, e.g., ABE7.10. In some embodiments, any of the base editing system comprising one of the ABE8 base editor variants described herein has reduced bystander editing or mutations by at least 1.1 fold, at least 1.2 fold, at least 1.3 fold, at least 1.4 fold, at least 1.5 fold, at least 1.6 fold, at least 1.7 fold, at least 1.8 fold, at least 1.9 fold, at least 2.0 fold, at least 2.1 fold, at least 2.2 fold, at least 2.3 fold, at least 2.4 fold, at least 2.5 fold, at least 2.6 fold, at least 2.7 fold, at least 2.8 fold, at least 2.9 fold, or at least 3.0 fold compared to a base editor system comprising an ABE7 base editor, e.g., ABE7.10.

[0668] In some embodiments, any of the base editing system comprising one of the ABE8 base editor variants described herein has reduced spurious editing. In some embodiments, an unintended editing or mutation is a spurious mutation or spurious editing, for example, non-specific editing or guide independent editing of a target base (e.g., A or C) in an unintended or non-target region of the genome. In some embodiments, any of the base editing system comprising one of the ABE8 base editor variants described herein has reduced spurious editing compared to a base editor system comprising an ABE7 base editor, e.g., ABE7.10. In some embodiments, any of the base editing system comprising one of the ABE8 base editor variants described herein has reduced spurious editing by at least 1%, at least 2%, at least 3%, at least 4%, at least 5%, at least 10%, at least 15%, at least 20%, at least 25%, at least 30%, at least 35%, at least 40%, at least 45%, at least 50%, at least 55%, at least 60%, at least 65%, at least 70%, at least 75%, at least 80%, at least 85%, at least 90%, at least 95%, or at least 99% compared to a base editor system comprising an ABE7 base editor, e.g., ABE7.10. In some embodiments, any of the base editing system comprising one of the ABE8 base editor variants described herein has reduced spurious editing by at least 1.1 fold, at least 1.2 fold, at least 1.3 fold, at least 1.4 fold, at least 1.5 fold, at least 1.6 fold, at least 1.7 fold, at least 1.8 fold, at least 1.9 fold, at least 2.0 fold, at least 2.1 fold, at least 2.2 fold, at least 2.3 fold, at least 2.4 fold, at least 2.5 fold, at least 2.6 fold, at least 2.7 fold, at least 2.8 fold, at least 2.9 fold, or at least 3.0 fold compared to a base editor system comprising an ABE7 base editor, e.g., ABE7.10.

[0669] Some aspects of the disclosure are based on the recognition that any of the base editors provided herein are capable of efficiently generating an intended mutation, such as a point mutation, in a nucleic acid (e.g., a nucleic acid within a genome of a subject) without generating a significant number of unintended mutations, such as unintended point mutations (i.e., mutation of bystanders). In some embodiments, any of the base editors provided herein are capable of generating at least 0.01% of intended mutations (i.e., at least 0.01% base editing efficiency). In some embodiments, any of the base editors provided herein are capable of generating at least 0.01%, 1%, 2%, 3%, 4%, 5%, 10%, 15%, 20%, 25%, 30%, 40%, 45%, 50%, 60%, 70%, 80%, 90%, 95%, or 99% of intended mutations.

[0670] In some embodiments, any of the ABE8 base editor variants described herein have at least 0.01%, at least 1%, at least 2%, at least 3%, at least 4%, at least 5%, at least 10%, at least 15%, at least 20%, at least 25%, at least 30%, at least 35%, at least 40%, at least 45%, at least 50%, at least 55%, at least 60%, at least 65%, at least 70%, at least 75%, at least 80%, at least 85%, at least 90%, at least 95%, or at least 99% base editing efficiency. In some embodiments, the base editing efficiency may be measured by calculating the percentage of edited nucleobases in a population of cells. In some embodiments, any of the ABE8 base editor variants described herein have base editing efficiency of at least 0.01%, at least 1%, at least 2%, at least 3%, at least 4%, at least 5%, at least 10%, at least 15%, at least 20%, at least 25%, at least 30%, at least 35%, at least 40%, at least 45%, at least 50%, at least 55%, at least 60%, at least 65%, at least 70%, at least 75%, at least 80%, at least 85%, at least 90%, at least 95%, or at least 99% as measured by edited nucleobases in a population of cells.

[0671] In some embodiments, any of the ABE8 base editor variants described herein has higher base editing efficiency compared to the ABE7 base editors. In some embodiments, any of the ABE8 base editor variants described herein have at least 1%, at least 2%, at least 3%, at least 4%, at least 5%, at least 10%, at least 15%, at least 20%, at least 25%, at least 30%, at least 35%, at least 40%, at least 45%, at least 50%, at least 55%, at least 60%, at least 65%, at least 70%, at least 75%, at least 80%, at least 85%, at least 90%, at least 95%, at least 99%, at least 100%, at least 105%, at least 110%, at least 115%, at least 120%, at least 125%, at least 130%, at least 135%, at least 140%, at least 145%, at least 150%, at least 155%, at least 160%, at least 165%, at least 170%, at least 175%, at least 180%, at least 185%, at least 190%, at least 195%, at least 200%, at least 210%, at least 220%, at least 230%, at least 240%, at least 250%, at least 260%, at least 270%, at least 280%, at least 290%, at least 300%, at least 310%, at least 320%, at least 330%, at least 340%, at least 350%, at least 360%, at least 370%, at least 380%, at least 390%, at least 400%, at least 450%, or at least 500% higher base editing efficiency compared to an ABE7 base editor, e.g., ABE7.10.

[0672] In some embodiments, any of the ABE8 base editor variants described herein has at least 1.1 fold, at least 1.2 fold, at least 1.3 fold, at least 1.4 fold, at least 1.5 fold, at least 1.6 fold, at least 1.7 fold, at least 1.8 fold, at least 1.9 fold, at least 2.0 fold, at least 2.1 fold, at least 2.2 fold, at least 2.3 fold, at least 2.4 fold, at least 2.5 fold, at least 2.6 fold, at least 2.7 fold, at least 2.8 fold, at least 2.9 fold, at least 3.0 fold, at least 3.1 fold, at least 3.2, at least 3.3 fold, at least 3.4 fold, at least 3.5 fold, at least 3.6 fold, at least 3.7 fold, at least 3.8 fold, at least 3.9 fold, at least 4.0 fold, at least 4.1 fold, at least 4.2 fold, at least 4.3 fold, at least 4.4 fold, at least 4.5 fold, at least 4.6 fold, at least 4.7 fold, at least 4.8 fold, at least 4.9 fold, or at least 5.0 fold higher base editing efficiency compared to an ABE7 base editor, e.g., ABE7.10.

[0673] In some embodiments, any of the ABE8 base editor variants described herein have at least 0.01%, at least 1%, at least 2%, at least 3%, at least 4%, at least 5%, at least 10%, at least 15%, at least 20%, at least 25%, at least 30%, at least 35%, at least 40%, at least 45%, at least 50%, at least 55%, at least 60%, at least 65%, at least 70%, at least 75%, at least 80%, at least 85%, at least 90%, at least 95%, or at least 99% on-target base editing efficiency. In some embodiments, any of the ABE8 base editor variants described herein have on-target base editing efficiency of at least 0.01%, at least 1%, at least 2%, at least 3%, at least 4%, at least 5%, at least 10%, at least 15%, at least 20%, at least 25%, at least 30%, at least 35%, at least 40%, at least 45%, at least 50%, at least 55%, at least 60%, at least 65%, at least 70%, at least 75%, at least 80%, at least 85%, at least 90%, at least 95%, or at least 99% as measured by edited target nucleobases in a population of cells.

[0674] In some embodiments, any of the ABE8 base editor variants described herein has higher on-target base editing efficiency compared to the ABE7 base editors. In some embodiments, any of the ABE8 base editor variants described herein have at least 1%, at least 2%, at least 3%, at least 4%, at least 5%, at least 10%, at least 15%, at least 20%, at least 25%, at least 30%, at least 35%, at least 40%, at least 45%, at least 50%, at least 55%, at least 60%, at least 65%, at least 70%, at least 75%, at least 80%, at least 85%, at least 90%, at least 95%, at least 99%, at least 100%, at least 105%, at least 110%, at least 115%, at least 120%, at least 125%, at least 130%, at least 135%, at least 140%, at least 145%, at least 150%, at least 155%, at least 160%, at least 165%, at least 170%, at least 175%, at least 180%, at least 185%, at least 190%, at least 195%, at least 200%, at least 210%, at least 220%, at least 230%, at least 240%, at least 250%, at least 260%, at least 270%, at least 280%, at least 290%, at least 300%, at least 310%, at least 320%, at least 330%, at least 340%, at least 350%, at least 360%, at least 370%, at least 380%, at least 390%, at least 400%, at least 450%, or at least 500% higher on-target base editing efficiency compared to an ABE7 base editor, e.g., ABE7.10.

[0675] In some embodiments, any of the ABE8 base editor variants described herein has at least 1.1 fold, at least 1.2 fold, at least 1.3 fold, at least 1.4 fold, at least 1.5 fold, at least 1.6 fold, at least 1.7 fold, at least 1.8 fold, at least 1.9 fold, at least 2.0 fold, at least 2.1 fold, at least 2.2 fold, at least 2.3 fold, at least 2.4 fold, at least 2.5 fold, at least 2.6 fold, at least 2.7 fold, at least 2.8 fold, at least 2.9 fold, at least 3.0 fold, at least 3.1 fold, at least 3.2 fold, at least 3.3 fold, at least 3.4 fold, at least 3.5 fold, at least 3.6 fold, at least 3.7 fold, at least 3.8 fold, at least 3.9 fold, at least 4.0 fold, at least 4.1 fold, at least 4.2 fold, at least 4.3 fold, at least 4.4 fold, at least 4.5 fold, at least 4.6 fold, at least 4.7 fold, at least 4.8 fold, at least 4.9 fold, or at least 5.0 fold higher on-target base editing efficiency compared to an ABE7 base editor, e.g., ABE7.10.

[0676] The ABE8 base editor variants described herein may be delivered to a host cell via a plasmid, a vector, a LNP complex, or an mRNA. In some embodiments, any of the ABE8 base editor variants described herein is delivered to a host cell as an mRNA. In some embodiments, an ABE8 base editor delivered via a nucleic acid based delivery system, e.g., an mRNA, has on-target editing efficiency of at least at least 1%, at least 2%, at least 3%, at least 4%, at least 5%, at least 10%, at least 15%, at least 20%, at least 25%, at least 30%, at least 35%, at least 40%, at least 45%, at least 50%, at least 55%, at least 60%, at least 65%, at least 70%, at least 75%, at least 80%, at least 85%, at least 90%, at least 95%, or at least 99% as measured by edited nucleobases. In some embodiments, an ABE8 base editor delivered by an mRNA system has higher base editing efficiency compared to an ABE8 base editor delivered by a plasmid or vector system. In some embodiments, any of the ABE8 base editor variants described herein has at least 1%, at least 2%, at least 3%, at least 4%, at least 5%, at least 10%, at least 15%, at least 20%, at least 25%, at least 30%, at least 35%, at least 40%, at least 45%, at least 50%, at least 55%, at least 60%, at least 65%, at least 70%, at least 75%, at least 80%, at least 85%, at least 90%, at least 95%, at least 99%, at least 100%, at least 105%, at least 110%, at least 115%, at least 120%, at least 125%, at least 130%, at least 135%, at least 140%, at least 145%, at least 150%, at least 155%, at least 160%, at least 165%, at least 170%, at least 175%, at least 180%, at least 185%, at least 190%, at least 195%, at least 200%, at least 210%, at least 220%, at least 230%, at least 240%, at least 250%, at least 260%, at least 270%, at least 280%, at least 290%, at least 300% higher, at least 310%, at least 320%, at least 330%, at least 340%, at least 350%, at least 360%, at least 370%, at least 380%, at least 390%, at least 400%, at least 450%, or at least 500% on-target editing efficiency when delivered by an mRNA system compared to when delivered by a plasmid or vector system. In some embodiments, any of the ABE8 base editor variants described herein has at least 1.1 fold, at least 1.2 fold, at least 1.3 fold, at least 1.4 fold, at least 1.5 fold, at least 1.6 fold, at least 1.7 fold, at least 1.8 fold, at least 1.9 fold, at least 2.0 fold, at least 2.1 fold, at least 2.2 fold, at least 2.3 fold, at least 2.4 fold, at least 2.5 fold, at least 2.6 fold, at least 2.7 fold, at least 2.8 fold, at least 2.9 fold, at least 3.0 fold, at least 3.1 fold, at least 3.2 fold, at least 3.3 fold, at least 3.4 fold, at least 3.5 fold, at least 3.6 fold, at least 3.7 fold, at least 3.8 fold, at least 3.9 fold, at least 4.0 fold, at least 4.1 fold, at least 4.2 fold, at least 4.3 fold, at least 4.4 fold, at least 4.5 fold, at least 4.6 fold, at least 4.7 fold, at least 4.8 fold, at least 4.9 fold, or at least 5.0 fold higher on-target editing efficiency when delivered by an mRNA system compared to when delivered by a plasmid or vector system.

[0677] In some embodiments, any of base editor systems comprising one of the ABE8 base editor variants described herein result in less than 50%, less than 40%, less than 30%, less than 20%, less than 19%, less than 18%, less than 17%, less than 16%, less than 15%, less than 14%, less than 13%, less than 12%, less than 11%, less than 10%, less than 9%, less than 8%, less than 7%, less than 6%, less than 5%, less than 4%, less than 3%, less than 2%, less than 1%, less than 0.9%, less than 0.8%, less than 0.7%, less than 0.6%, less than 0.5%, less than 0.4%, less than 0.3%, less than 0.2%, less than 0.1%, less than 0.09%, less than 0.08%, less than 0.07%, less than 0.06%, less than 0.05%, less than 0.04%, less than 0.03%, less than 0.02%, or less than 0.01% off-target editing in the target polynucleotide sequence.

[0678] In some embodiments, any of the ABE8 base editor variants described herein has lower guided off-target editing efficiency when delivered by an mRNA system compared to when delivered by a plasmid or vector system. In some embodiments, any of the ABE8 base editor variants described herein has at least 1%, at least 2%, at least 3%, at least 4%, at least 5%, at least 10%, at least 15%, at least 20%, at least 25%, at least 30%, at least 35%, at least 40%, at least 45%, at least 50%, at least 55%, at least 60%, at least 65%, at least 70%, at least 75%, at least 80%, at least 85%, at least 90%, at least 95%, or at least 99% lower guided off-target editing efficiency when delivered by an mRNA system compared to when delivered by a plasmid or vector system. In some embodiments, any of the ABE8 base editor variants described herein has at least 1.1 fold, at least 1.2 fold, at least 1.3 fold, at least 1.4 fold, at least 1.5 fold, at least 1.6 fold, at least 1.7 fold, at least 1.8 fold, at least 1.9 fold, at least 2.0 fold, at least 2.1 fold, at least 2.2 fold, at least 2.3 fold, at least 2.4 fold, at least 2.5 fold, at least 2.6 fold, at least 2.7 fold, at least 2.8 fold, at least 2.9 fold, or at least 3.0 fold lower guided off-target editing efficiency when delivered by an mRNA system compared to when delivered by a plasmid or vector system. In some embodiments, any of the ABE8 base editor variants described herein has at least about 2.2 fold decrease in guided off-target editing efficiency when delivered by an mRNA system compared to when delivered by a plasmid or vector system.

[0679] In some embodiments, any of the ABE8 base editor variants described herein has lower guide-independent off-target editing efficiency when delivered by an mRNA system compared to when delivered by a plasmid or vector system. In some embodiments, any of the ABE8 base editor variants described herein has at least 1%, at least 2%, at least 3%, at least 4%, at least 5%, at least 10%, at least 15%, at least 20%, at least 25%, at least 30%, at least 35%, at least 40%, at least 45%, at least 50%, at least 55%, at least 60%, at least 65%, at least 70%, at least 75%, at least 80%, at least 85%, at least 90%, at least 95%, or at least 99% lower guide-independent off-target editing efficiency when delivered by an mRNA system compared to when delivered by a plasmid or vector system. In some embodiments, any of the ABE8 base editor variants described herein has at least 1.1 fold, at least 1.2 fold, at least 1.3 fold, at least 1.4 fold, at least 1.5 fold, at least 1.6 fold, at least 1.7 fold, at least 1.8 fold, at least 1.9 fold, at least 2.0 fold, at least 2.1 fold, at least 2.2 fold, at least 2.3 fold, at least 2.4 fold, at least 2.5 fold, at least 2.6 fold, at least 2.7 fold, at least 2.8 fold, at least 2.9 fold, at least 3.0 fold, at least 5.0 fold, at least 10.0 fold, at least 20.0 fold, at least 50.0 fold, at least 70.0 fold, at least 100.0 fold, at least 120.0 fold, at least 130.0 fold, or at least 150.0 fold lower guide-independent off-target editing efficiency when delivered by an mRNA system compared to when delivered by a plasmid or vector system. In some embodiments, ABE8 base editor variants described herein has 134.0 fold decrease in guide-independent off-target editing efficiency (e.g., spurious RNA deamination) when delivered by an mRNA system compared to when delivered by a plasmid or vector system. In some embodiments, ABE8 base editor variants described herein does not increase guide-independent mutation rates across the genome.

[0680] Some aspects of the disclosure are based on the recognition that any of the base editors provided herein are capable of efficiently generating an intended mutation, such as a point mutation, in a nucleic acid (e.g., a nucleic acid within a genome of a subject) without generating a significant number of unintended mutations (e.g., spurious off-target editing or bystander editing). In some embodiments, an intended mutation is a mutation that is generated by a specific base editor bound to a gRNA, specifically designed to alter or correct a mutation in a target gene. Some aspects of the disclosure are based on the recognition that any of the base editors provided herein are capable of efficiently generating an intended mutation in a nucleic acid (e.g. a nucleic acid within a genome of a subject) without generating a significant number of unintended mutations. In some embodiments, an intended mutation is a mutation that is generated by a specific base editor bound to a gRNA, specifically designed to alter or correct an intended mutation. In some embodiments, the intended mutation is a mutation that generates a stop codon, for example, a premature stop codon within the coding region of a gene. In some embodiments, the intended mutation is a mutation that eliminates a stop codon. In some embodiments, the intended mutation is a mutation that alters the splicing of a gene. In some embodiments, the intended mutation is a mutation that alters the regulatory sequence of a gene (e.g., a gene promotor or gene repressor).

[0681] In some embodiments, the base editors provided herein are capable of generating a ratio of intended mutations to indels (i.e., unintended mutations) that is greater than 1:1. In some embodiments, the base editors provided herein are capable of generating a ratio of intended mutations to indels that is at least 1.5:1, at least 2:1, at least 2.5:1, at least 3:1, at least 3.5:1, at least 4:1, at least 4.5:1, at least 5:1, at least 5.5:1, at least 6:1, at least 6.5:1, at least 7:1, at least 7.5:1, at least 8:1, at least 10:1, at least 12:1, at least 15:1, at least 20:1, at least 25:1, at least 30:1, at least 40:1, at least 50:1, at least 100:1, at least 200:1, at least 300:1, at least 400:1, at least 500:1, at least 600:1, at least 700:1, at least 800:1, at least 900:1, or at least 1000:1, or more. It should be appreciated that the characteristics of the base editors described herein may be applied to any of the fusion proteins, or methods of using the fusion proteins provided herein.

[0682] The number of intended mutations and indels can be determined using any suitable method, for example, as described in International PCT Application Nos. PCT/2017/045381 (WO2018/027078) and PCT/US2016/058344 (WO2017/070632); Komor, A. C., et al., “Programmable editing of a target base in genomic DNA without double-stranded DNA cleavage” Nature 533, 420-424 (2016); Gaudelli, N. M., et al., “Programmable base editing of A•T to G•C in genomic DNA without DNA cleavage” Nature 551, 464-471 (2017); and Komor, A. C., et al., “Improved base excision repair inhibition and bacteriophage Mu Gam protein yields C:G-to-T:A base editors with higher efficiency and product purity” Science Advances 3:eaao4774 (2017); the entire contents of which are hereby incorporated by reference.

[0683] In some embodiments, to calculate indel frequencies, sequencing reads are scanned for exact matches to two 10-bp sequences that flank both sides of a window in which indels can occur. If no exact matches are located, the read is excluded from analysis. If the length of this indel window exactly matches the reference sequence the read is classified as not containing an indel. If the indel window is two or more bases longer or shorter than the reference sequence, then the sequencing read is classified as an insertion or deletion, respectively. In some embodiments, the base editors provided herein can limit formation of indels in a region of a nucleic acid. In some embodiments, the region is at a nucleotide targeted by a base editor or a region within 2, 3, 4, 5, 6, 7, 8, 9, or 10 nucleotides of a nucleotide targeted by a base editor.

[0684] The number of indels formed at a target nucleotide region can depend on the amount of time a nucleic acid (e.g., a nucleic acid within the genome of a cell) is exposed to a base editor. In some embodiments, the number or proportion of indels is determined after at least 1 hour, at least 2 hours, at least 6 hours, at least 12 hours, at least 24 hours, at least 36 hours, at least 48 hours, at least 3 days, at least 4 days, at least 5 days, at least 7 days, at least 10 days, or at least 14 days of exposing the target nucleotide sequence (e.g., a nucleic acid within the genome of a cell) to a base editor. It should be appreciated that the characteristics of the base editors as described herein can be applied to any of the fusion proteins, or methods of using the fusion proteins provided herein.

[0685] In some embodiments, the base editors provided herein are capable of limiting formation of indels in a region of a nucleic acid. In some embodiments, the region is at a nucleotide targeted by a base editor or a region within 2, 3, 4, 5, 6, 7, 8, 9, or 10 nucleotides of a nucleotide targeted by a base editor. In some embodiments, any of the base editors provided herein are capable of limiting the formation of indels at a region of a nucleic acid to less than 1%, less than 1.5%, less than 2%, less than 2.5%, less than 3%, less than 3.5%, less than 4%, less than 4.5%, less than 5%, less than 6%, less than 7%, less than 8%, less than 9%, less than 10%, less than 12%, less than 15%, or less than 20%. The number of indels formed at a nucleic acid region may depend on the amount of time a nucleic acid (e.g., a nucleic acid within the genome of a cell) is exposed to a base editor. In some embodiments, any number or proportion of indels is determined after at least 1 hour, at least 2 hours, at least 6 hours, at least 12 hours, at least 24 hours, at least 36 hours, at least 48 hours, at least 3 days, at least 4 days, at least 5 days, at least 7 days, at least 10 days, or at least 14 days of exposing a nucleic acid (e.g., a nucleic acid within the genome of a cell) to a base editor.

### Multiplex Editing

[0686] In some embodiments, the base editor system provided herein is capable of multiplex editing of a plurality of nucleobase pairs in one or more genes. In some embodiments, the plurality of nucleobase pairs is located in the same gene. In some embodiments, the plurality of nucleobase pairs is located in one or more gene, wherein at least one gene is located in a different locus. In some embodiments, the multiplex editing can comprise one or more guide polynucleotides. In some embodiments, the multiplex editing can comprise one or more base editor system. In some embodiments, the multiplex editing can comprise one or more base editor systems with a single guide polynucleotide. In some embodiments, the multiplex editing can comprise one or more base editor system with a plurality of guide polynucleotides. In some embodiments, the multiplex editing can comprise one or more guide polynucleotide with a single base editor system. In some embodiments, the multiplex editing can comprise at least one guide polynucleotide that does not require a PAM sequence to target binding to a target polynucleotide sequence. In some embodiments, the multiplex editing can comprise at least one guide polynucleotide that requires a PAM sequence to target binding to a target polynucleotide sequence. In some embodiments, the multiplex editing can comprise a mix of at least one guide polynucleotide that does not require a PAM sequence to target binding to a target polynucleotide sequence and at least one guide polynucleotide that require a PAM sequence to target binding to a target polynucleotide sequence. It should be appreciated that the characteristics of the multiplex editing using any of the base editors as described herein can be applied to any of combination of the methods of using any of the base editor provided herein. It should also be appreciated that the multiplex editing using any of the base editors as described herein can comprise a sequential editing of a plurality of nucleobase pairs.

[0687] In some embodiments, the plurality of nucleobase pairs are in one more genes. In some embodiments, the plurality of nucleobase pairs is in the same gene. In some embodiments, at least one gene in the one more genes is located in a different locus.

[0688] In some embodiments, the editing is editing of the plurality of nucleobase pairs in at least one protein coding region. In some embodiments, the editing is editing of the plurality of nucleobase pairs in at least one protein non-coding region. In some embodiments, the editing is editing of the plurality of nucleobase pairs in at least one protein coding region and at least one protein non-coding region.

[0689] In some embodiments, the editing is in conjunction with one or more guide polynucleotides. In some embodiments, the base editor system can comprise one or more base editor system. In some embodiments, the base editor system can comprise one or more base editor systems in conjunction with a single guide polynucleotide. In some embodiments, the base editor system can comprise one or more base editor system in conjunction with a plurality of guide polynucleotides. In some embodiments, the editing is in conjunction with one or more guide polynucleotide with a single base editor system. In some embodiments, the editing is in conjunction with at least one guide polynucleotide that does not require a PAM sequence to target binding to a target polynucleotide sequence. In some embodiments, the editing is in conjunction with at least one guide polynucleotide that require a PAM sequence to target binding to a target polynucleotide sequence. In some embodiments, the editing is in conjunction with a mix of at least one guide polynucleotide that does not require a PAM sequence to target binding to a target polynucleotide sequence and at least one guide polynucleotide that require a PAM sequence to target binding to a target polynucleotide sequence. It should be appreciated that the characteristics of the multiplex editing using any of the base editors as described herein can be applied to any of combination of the methods of using any of the base editors provided herein. It should also be appreciated that the editing can comprise a sequential editing of a plurality of nucleobase pairs.

[0690] In some embodiments, the base editor system capable of multiplex editing of a plurality of nucleobase pairs in one or more genes comprises one of the ABE8 base editor variants described herein. In some embodiments, the base editor system capable of multiplex editing of a plurality of nucleobase pairs in one or more genes comprises one of ABE7 base editors. In some embodiments, the base editor system capable of multiplex editing comprising one of the ABE8 base editor variants described herein has higher multiplex editing efficiency compared the base editor system capable of multiplex editing comprising one of ABE7 base editors. In some embodiments, the base editor system capable of multiplex editing comprising one of the ABE8 base editor variants described herein has at least 1%, at least 2%, at least 3%, at least 4%, at least 5%, at least 10%, at least 15%, at least 20%, at least 25%, at least 30%, at least 35%, at least 40%, at least 45%, at least 50%, at least 55%, at least 60%, at least 65%, at least 70%, at least 75%, at least 80%, at least 85%, at least 90%, at least 95%, at least 99%, at least 100%, at least 105%, at least 110%, at least 115%, at least 120%, at least 125%, at least 130%, at least 135%, at least 140%, at least 145%, at least 150%, at least 155%, at least 160%, at least 165%, at least 170%, at least 175%, at least 180%, at least 185%, at least 190%, at least 195%, at least 200%, at least 210%, at least 220%, at least 230%, at least 240%, at least 250%, at least 260%, at least 270%, at least 280%, at least 290%, at least 300% higher, at least 310%, at least 320%, at least 330%, at least 340%, at least 350%, at least 360%, at least 370%, at least 380%, at least 390%, at least 400%, at least 450%, or at least 500% higher multiplex editing efficiency compared the base editor system capable of multiplex editing comprising one of ABE7 base editors. In some embodiments, the base editor system capable of multiplex editing comprising one of the ABE8 base editor variants described herein has at least 1.1 fold, at least 1.2 fold, at least 1.3 fold, at least 1.4 fold, at least 1.5 fold, at least 1.6 fold, at least 1.7 fold, at least 1.8 fold, at least 1.9 fold, at least 2.0 fold, at least 2.1 fold, at least 2.2 fold, at least 2.3 fold, at least 2.4 fold, at least 2.5 fold, at least 2.6 fold, at least 2.7 fold, at least 2.8 fold, at least 2.9 fold, at least 3.0 fold, at least 3.1 fold, at least 3.2 fold, at least 3.3 fold, at least 3.4 fold, at least 3.5 fold, at least 4.0 fold, at least 4.5 fold, at least 5.0 fold, at least 5.5 fold, or at least 6.0 fold higher multiplex editing efficiency compared the base editor system capable of multiplex editing comprising one of ABE7 base editors.

Fusion Proteins with Internal Insertions

[0691] Provided herein are fusion proteins comprising a heterologous polypeptide fused to a nucleic acid programmable nucleic acid binding protein, for example, a napDNAbp. A heterologous polypeptide can be a polypeptide that is not found in the native or wild-type napDNAbp polypeptide sequence. The heterologous polypeptide can be fused to the napDNAbp at a C-terminal end of the napDNAbp, an N-terminal end of the napDNAbp, or inserted at an internal location of the napDNAbp. In some embodiments, the heterologous polypeptide is inserted at an internal location of the napDNAbp.

[0692] In some embodiments, the heterologous polypeptide is a deaminase or a functional fragment thereof. For example, a fusion protein can comprise a deaminase (e.g., adenosine deaminase) flanked by an N-terminal fragment and a C-terminal fragment of a Cas9 or Cas12 (e.g., Cas12b/C2c1), polypeptide. The deaminase in a fusion protein can be an adenosine deaminase. In some embodiments, the adenosine deaminase is a TadA (e.g., TadA7.10 or TadA*8). In some embodiments, the TadA is a TadA*8. TadA sequences (e.g., TadA7.10 or TadA*8) as described herein are suitable deaminases for the above-described fusion proteins.

[0693] The deaminase can be a circular permutant deaminase. For example, the deaminase can be a circular permutant adenosine deaminase. In some embodiments, the deaminase is a circular permutant TadA, circularly permutated at amino acid residue 116 as numbered in the TadA reference sequence. In some embodiments, the deaminase is a circular permutant TadA, circularly permutated at amino acid residue 136 as numbered in the TadA reference sequence. In some embodiments, the deaminase is a circular permutant TadA, circularly permutated at amino acid residue 65 as numbered in the TadA reference sequence.

[0694] The fusion protein can comprise more than one deaminase. The fusion protein can comprise, for example, 1, 2, 3, 4, 5 or more deaminases. In some embodiments, the fusion protein comprises one deaminase. In some embodiments, the fusion protein comprises two deaminases. The two or more deaminases in a fusion protein can be an adenosine deaminase. cytidine deaminase, or a combination thereof. The two or more deaminases can be homodimers. The two or more deaminases can be heterodimers. The two or more deaminases can be inserted in tandem in the napDNAbp. In some embodiments, the two or more deaminases may not be in tandem in the napDNAbp.

[0695] In some embodiments, the napDNAbp in the fusion protein is a Cas9 polypeptide or a fragment thereof. The Cas9 polypeptide can be a variant Cas9 polypeptide. In some embodiments, the Cas9 polypeptide is a Cas9 nickase (nCas9) polypeptide or a fragment thereof. In some embodiments, the Cas9 polypeptide is a nuclease dead Cas9 (dCas9) polypeptide or a fragment thereof. The Cas9 polypeptide in a fusion protein can be a full-length Cas9 polypeptide. In some cases, the Cas9 polypeptide in a fusion protein may not be a full length Cas9 polypeptide. The Cas9 polypeptide can be truncated, for example, at a N-terminal or C-terminal end relative to a naturally-occurring Cas9 protein. The Cas9 polypeptide can be a circularly permuted Cas9 protein. The Cas9 polypeptide can be a fragment, a portion, or a domain of a Cas9 polypeptide, that is still capable of binding the target polynucleotide and a guide nucleic acid sequence.

[0696] In some embodiments, the Cas9 polypeptide is a Streptococcus pyogenes Cas9 (SpCas9), Staphylococcus aureus Cas9 (SaCas9), Streptococcus thermophilus 1 Cas9 (St1Cas9), or fragments or variants thereof.

[0697] The Cas9 polypeptide of a fusion protein can comprise an amino acid sequence that is at least 85%, at least 90%, at least 91%, at least 92%, at least 93%, at least 94%, at least 95%, at least 96%, at least 97%, at least 98%, at least 99%, or at least 99.5% identical to a naturally-occurring Cas9 polypeptide.

[0698] The Cas9 polypeptide of a fusion protein can comprise an amino acid sequence that is at least 85%, at least 90%, at least 91%, at least 92%, at least 93%, at least 94%, at least 95%, at least 96%, at least 97%, at least 98%, at least 99%, or at least 99.5% identical to the Cas9 amino acid sequence set forth below (called the “Cas9 reference sequence” below):

MDKKYSIGLDIGTNSVGWAVITDEYKVPSKKFKVLGNTDRHSIKKNLIGA
LLFDSGETAEATRLKRTARRRYTRRKNRICYLQEIFSNEMAKVDDSFFHR
LEESFLVEEDKKHERHPIFGNIVDEVAYHEKYPTIYHLRKKLVDSTDKAD
LRLIYLALAHMIKFRGHFLIEGDLNPDNSDVDKLFIQLVQTYNQLFEENP
INASGVDAKAILSARLSKSRRLENLIAQLPGEKKNGLFGNLIALSLGLTP
NFKSNFDLAEDAKLQLSKDTYDDDLDNLLAQIGDQYADLFLAAKNLSDAI
LLSDILRVNTEITKAPLSASMIKRYDEHHQDLTLLKALVRQQLPEKYKEI
FFDQSKNGYAGYIDGGASQEEFYKFIKPILEKMDGTEELLVKLNREDLLR
KQRTFDNGSIPHQIHLGELHAILRRQEDFYPFLKDNREKIEKILTFRIPY
YVGPLARGNSRFAWMTRKSEETITPWNFEEVVDKGASAQSFIERMTNFDK
NLPNEKVLPKHSLLYEYFTVYNELTKVKYVTEGMRKPAFLSGEQKKAIVD
LLFKTNRKVTVKQLKEDYFKKIECFDSVEISGVEDRFNASLGTYHDLLKI
IKDKDFLDNEENEDILEDIVLTLTLFEDREMIEERLKTYAHLFDDKVMKQ
LKRRRYTGWGRLSRKLINGIRDKQSGKTILDFLKSDGFANRNFMQLIHDD
SLTFKEDIQKAQVSGQGDSLHEHIANLAGSPAIKKGILQTVKVVDELVKV
MGRHKPENIVIEMARENQTTQKGQKNSRERMKRIEEGIKELGSQILKEHP
VENTQLQNEKLYLYYLQNGRDMYVDQELDINRLSDYDVDHIVPQSFLKDD
SIDNKVLTRSDKNRGKSDNVPSEEVVKKMKNYWRQLLNAKLITQRKFDNL
TKAERGGLSELDKAGFIKRQLVETRQITKHVAQILDSRMNTKYDENDKLI
REVKVITLKSKLVSDFRKDFQFYKVREINNYHHAHDAYLNAVVGTALIKK
YPKLESEFVYGDYKVYDVRKMIAKSEQEIGKATAKYFFYSNIMNFFKTEI
TLANGEIRKRPLIETNGETGEIVWDKGRDFATVRKVLSMPQVNIVKKTEV
QTGGFSKESILPKRNSDKLIARKKDWDPKKYGGFDSPTVAYSVLVVAKVE
KGKSKKLKSVKELLGITIMERSSFEKNPIDFLEAKGYKEVKKDLIIKLPK
YSLFELENGRKRMLASAGELQKGNELALPSKYVNFLYLASHYEKLKGSPE
DNEQKQLFVEQHKHYLDEIIEQISEFSKRVILADANLDKVLSAYNKHRDK
PIREQAENIIHLFTLTNLGAPAAFKYFDTTIDRKRYTSTKEVLDATLIHQ
SITGLYETRIDLSQLGGD (single underline: HNH domain;
double underline: RuvC domain)

[0699] In some embodiments, the napDNAbp in the fusion protein is a Cas12 polypeptide, e.g., Cas12b/C2c1, or a fragment thereof. The Cas12 polypeptide can be a variant Cas12 polypeptide.

[0700] The heterologous polypeptide (e.g., deaminase) can be inserted in the napDNAbp (e.g., Cas9 or Cas12 (e.g., Cas12b/C2c1)) at a suitable location, for example, such that the napDNAbp retains its ability to bind the target polynucleotide and a guide nucleic acid. A deaminase (e.g., adenosine deaminase) can be inserted into a napDNAbp without compromising function of the deaminase (e.g., base editing activity) or the napDNAbp (e.g., ability to bind to target nucleic acid and guide nucleic acid). A deaminase (e.g., adenosine deaminase) can be inserted in the napDNAbp at, for example, a disordered region or a region comprising a high temperature factor or B-factor as shown by crystallographic studies. Regions of a protein that are less ordered, disordered, or unstructured, for example solvent exposed regions and loops, can be used for insertion without compromising structure or function. A deaminase (e.g., adenosine deaminase)can be inserted in the napDNAbp in a flexible loop region or a solvent-exposed region. In some embodiments, the deaminase (e.g., adenosine deaminase) is inserted in a flexible loop of the Cas9 or the Cas12b/C2c1 polypeptide.

[0701] In some embodiments, the insertion location of a deaminase (e.g., adenosine deaminase) is determined by B-factor analysis of the crystal structure of Cas9 polypeptide. In some embodiments, the deaminase (e.g., adenosine deaminase) is inserted in regions of the Cas9 polypeptide comprising higher than average B-factors (e.g., higher B factors compared to the total protein or the protein domain comprising the disordered region). B-factor or temperature factor can indicate the fluctuation of atoms from their average position (for example, as a result of temperature-dependent atomic vibrations or static disorder in a crystal lattice). A high B-factor (e.g., higher than average B-factor) for backbone atoms can be indicative of a region with relatively high local mobility. Such a region can be used for inserting a deaminase without compromising structure or function. A deaminase (e.g., adenosine deaminase) can be inserted at a location with a residue having a Ca atom with a B-factor that is 50%, 60%, 70%, 80%, 90%, 100%, 110%, 120%, 130%, 140%, 150%, 160%, 170%, 180%, 190%, 200%, or greater than 200% more than the average B-factor for the total protein. A deaminase (e.g., adenosine deaminase) can be inserted at a location with a residue having a Ca atom with a B-factor that is 50%, 60%, 70%, 80%, 90%, 100%, 110%, 120%, 130%, 140%, 150%, 160%, 170%, 180%, 190%, 200% or greater than 200% more than the average B-factor for a Cas9 protein domain comprising the residue. Cas9 polypeptide positions comprising a higher than average B-factor can include, for example, residues 768, 792, 1052, 1015, 1022, 1026, 1029, 1067, 1040, 1054, 1068, 1246, 1247, and 1248 as numbered in the above Cas9 reference sequence. Cas9 polypeptide regions comprising a higher than average B-factor can include, for example, residues 792-872, 792-906, and 2-791 as numbered in the above Cas9 reference sequence.

[0702] A heterologous polypeptide (e.g., deaminase) can be inserted in the napDNAbp at an amino acid residue selected from the group consisting of: 768, 791, 792, 1015, 1016, 1022, 1023, 1026, 1029, 1040, 1052, 1054, 1067, 1068, 1069, 1246, 1247, and 1248 as numbered in the above Cas9 reference sequence, or a corresponding amino acid residue in another Cas9 polypeptide. In some embodiments, the heterologous polypeptide is inserted between amino acid positions 768-769, 791-792, 792-793, 1015-1016, 1022-1023, 1026-1027, 1029-1030, 1040-1041, 1052-1053, 1054-1055, 1067-1068, 1068-1069, 1247-1248, or 1248-1249 as numbered in the above Cas9 reference sequence or corresponding amino acid positions thereof. In some embodiments, the heterologous polypeptide is inserted between amino acid positions 769-770, 792-793, 793-794, 1016-1017, 1023-1024, 1027-1028, 1030-1031, 1041-1042, 1053-1054, 1055-1056, 1068-1069, 1069-1070, 1248-1249, or 1249-1250 as numbered in the above Cas9 reference sequence or corresponding amino acid positions thereof. In some embodiments, the heterologous polypeptide replaces an amino acid residue selected from the group consisting of: 768, 791, 792, 1015, 1016, 1022, 1023, 1026, 1029, 1040, 1052, 1054, 1067, 1068, 1069, 1246, 1247, and 1248 as numbered in the above Cas9 reference sequence, or a corresponding amino acid residue in another Cas9 polypeptide. It should be understood that the reference to the above Cas9 reference sequence with respect to insertion positions is for illustrative purposes. The insertions as discussed herein are not limited to the Cas9 polypeptide sequence of the above Cas9 reference sequence, but include insertion at corresponding locations in variant Cas9 polypeptides, for example a Cas9 nickase (nCas9), nuclease dead Cas9 (dCas9), a Cas9 variant lacking a nuclease domain, a truncated Cas9, or a Cas9 domain lacking partial or complete HNH domain.

[0703] A heterologous polypeptide (e.g., deaminase) can be inserted in the napDNAbp at an amino acid residue selected from the group consisting of: 768, 792, 1022, 1026, 1040, 1068, and 1247 as numbered in the above Cas9 reference sequence, or a corresponding amino acid residue in another Cas9 polypeptide. In some embodiments, the heterologous polypeptide is inserted between amino acid positions 768-769, 792-793, 1022-1023, 1026-1027, 1029-1030, 1040-1041, 1068-1069, or 1247-1248 as numbered in the above Cas9 reference sequence or corresponding amino acid positions thereof. In some embodiments, the heterologous polypeptide is inserted between amino acid positions 769-770, 793-794, 1023-1024, 1027-1028, 1030-1031, 1041-1042, 1069-1070, or 1248-1249 as numbered in the above Cas9 reference sequence or corresponding amino acid positions thereof. In some embodiments, the heterologous polypeptide replaces an amino acid residue selected from the group consisting of: 768, 792, 1022, 1026, 1040, 1068, and 1247 as numbered in the above Cas9 reference sequence, or a corresponding amino acid residue in another Cas9 polypeptide.

[0704] A heterologous polypeptide (e.g., deaminase) can be inserted in the napDNAbp at an amino acid residue as described herein, or a corresponding amino acid residue in another Cas9 polypeptide. In an embodiment, a heterologous polypeptide (e.g., deaminase) can be inserted in the napDNAbp at an amino acid residue selected from the group consisting of: 1002, 1003, 1025, 1052-1056, 1242-1247, 1061-1077, 943-947, 686-691, 569-578, 530-539, and 1060-1077 as numbered in the above Cas9 reference sequence, or a corresponding amino acid residue in another Cas9 polypeptide. The deaminase (e.g., adenosine deaminase) can be inserted at the N-terminus or the C-terminus of the residue or replace the residue. In some embodiments, the deaminase (e.g., adenosine deaminase) is inserted at the C-terminus of the residue.

[0705] In some embodiments, an adenosine deaminase (e.g., TadA) is inserted at an amino acid residue selected from the group consisting of: 1015, 1022, 1029, 1040, 1068, 1247, 1054, 1026, 768, 1067, 1248, 1052, and 1246 as numbered in the above Cas9 reference sequence, or a corresponding amino acid residue in another Cas9 polypeptide. In some embodiments, an adenosine deaminase (e.g., TadA) is inserted in place of residues 792-872, 792-906, or 2-791 as numbered in the above Cas9 reference sequence, or a corresponding amino acid residue in another Cas9 polypeptide. In some embodiments, the adenosine deaminase is inserted at the N-terminus of an amino acid selected from the group consisting of: 1015, 1022, 1029, 1040, 1068, 1247, 1054, 1026, 768, 1067, 1248, 1052, and 1246 as numbered in the above Cas9 reference sequence, or a corresponding amino acid residue in another Cas9 polypeptide. In some embodiments, the adenosine deaminase is inserted at the C-terminus of an amino acid selected from the group consisting of: 1015, 1022, 1029, 1040, 1068, 1247, 1054, 1026, 768, 1067, 1248, 1052, and 1246 as numbered in the above Cas9 reference sequence, or a corresponding amino acid residue in another Cas9 polypeptide. In some embodiments, the adenosine deaminase is inserted to replace an amino acid selected from the group consisting of: 1015, 1022, 1029, 1040, 1068, 1247, 1054, 1026, 768, 1067, 1248, 1052, and 1246 as numbered in the above Cas9 reference sequence, or a corresponding amino acid residue in another Cas9 polypeptide.

[0706] In some embodiments, the deaminase (e.g., adenosine deaminase) is inserted at amino acid residue 768 as numbered in the above Cas9 reference sequence, or a corresponding amino acid residue in another Cas9 polypeptide. In some embodiments, the deaminase (e.g., adenosine deaminase) is inserted at the N-terminus of amino acid residue 768 as numbered in the above Cas9 reference sequence, or a corresponding amino acid residue in another Cas9 polypeptide. In some embodiments, the deaminase (e.g., adenosine deaminase) is inserted at the C-terminus of amino acid residue 768 as numbered in the above Cas9 reference sequence, or a corresponding amino acid residue in another Cas9 polypeptide. In some embodiments, the deaminase (e.g., adenosine deaminase) is inserted to replace amino acid residue 768 as numbered in the above Cas9 reference sequence, or a corresponding amino acid residue in another Cas9 polypeptide.

[0707] In some embodiments, the deaminase (e.g., adenosine deaminase) is inserted at amino acid residue 791 or is inserted at amino acid residue 792, as numbered in the above Cas9 reference sequence, or a corresponding amino acid residue in another Cas9 polypeptide. In some embodiments, the deaminase (e.g., adenosine deaminase) is inserted at the N-terminus of amino acid residue 791 or is inserted at the N-terminus of amino acid 792, as numbered in the above Cas9 reference sequence, or a corresponding amino acid residue in another Cas9 polypeptide. In some embodiments, the deaminase (e.g., adenosine deaminase) is inserted at the C-terminus of amino acid 791 or is inserted at the N-terminus of amino acid 792, as numbered in the above Cas9 reference sequence, or a corresponding amino acid residue in another Cas9 polypeptide. In some embodiments, the deaminase (e.g., adenosine deaminase) is inserted to replace amino acid 791, or is inserted to replace amino acid 792, as numbered in the above Cas9 reference sequence, or a corresponding amino acid residue in another Cas9 polypeptide.

[0708] In some embodiments, the deaminase (e.g., adenosine deaminase) is inserted at amino acid residue 1016 as numbered in the above Cas9 reference sequence, or a corresponding amino acid residue in another Cas9 polypeptide. In some embodiments, the deaminase (e.g., adenosine deaminase) is inserted at the N-terminus of amino acid residue 1016 as numbered in the above Cas9 reference sequence, or a corresponding amino acid residue in another Cas9 polypeptide. In some embodiments, the deaminase (e.g., adenosine deaminase) is inserted at the C-terminus of amino acid residue 1016 as numbered in the above Cas9 reference sequence, or a corresponding amino acid residue in another Cas9 polypeptide. In some embodiments, the deaminase (e.g., adenosine deaminase) is inserted to replace amino acid residue 1016 as numbered in the above Cas9 reference sequence, or a corresponding amino acid residue in another Cas9 polypeptide.

[0709] In some embodiments, the deaminase (e.g., adenosine deaminase) is inserted at amino acid residue 1022, or is inserted at amino acid residue 1023, as numbered in the above Cas9 reference sequence, or a corresponding amino acid residue in another Cas9 polypeptide. In some embodiments, the deaminase (e.g., adenosine deaminase) is inserted at the N-terminus of amino acid residue 1022 or is inserted at the N-terminus of amino acid residue 1023, as numbered in the above Cas9 reference sequence, or a corresponding amino acid residue in another Cas9 polypeptide. In some embodiments, the deaminase (e.g., adenosine deaminase) is inserted at the C-terminus of amino acid residue 1022 or is inserted at the C-terminus of amino acid residue 1023, as numbered in the above Cas9 reference sequence, or a corresponding amino acid residue in another Cas9 polypeptide. In some embodiments, the deaminase (e.g., adenosine deaminase) is inserted to replace amino acid residue 1022, or is inserted to replace amino acid residue 1023, as numbered in the above Cas9 reference sequence, or a corresponding amino acid residue in another Cas9 polypeptide.

[0710] In some embodiments, the deaminase (e.g., adenosine deaminase) is inserted at amino acid residue 1026, or is inserted at amino acid residue 1029, as numbered in the above Cas9 reference sequence, or a corresponding amino acid residue in another Cas9 polypeptide. In some embodiments, the deaminase (e.g., adenosine deaminase) is inserted at the N-terminus of amino acid residue 1026 or is inserted at the N-terminus of amino acid residue 1029, as numbered in the above Cas9 reference sequence, or a corresponding amino acid residue in another Cas9 polypeptide. In some embodiments, the deaminase (e.g., adenosine deaminase) is inserted at the C-terminus of amino acid residue 1026 or is inserted at the C-terminus of amino acid residue 1029, as numbered in the above Cas9 reference sequence, or a corresponding amino acid residue in another Cas9 polypeptide. In some embodiments, the deaminase (e.g., adenosine deaminase) is inserted to replace amino acid residue 1026, or is inserted to replace amino acid residue 1029, as numbered in the above Cas9 reference sequence, or corresponding amino acid residue in another Cas9 polypeptide.

[0711] In some embodiments, the deaminase (e.g., adenosine deaminase) is inserted at amino acid residue 1040 as numbered in the above Cas9 reference sequence, or a corresponding amino acid residue in another Cas9 polypeptide. In some embodiments, the deaminase (e.g., adenosine deaminase) is inserted at the N-terminus of amino acid residue 1040 as numbered in the above Cas9 reference sequence, or a corresponding amino acid residue in another Cas9 polypeptide. In some embodiments, the deaminase (e.g., adenosine deaminase) is inserted at the C-terminus of amino acid residue 1040 as numbered in the above Cas9 reference sequence, or a corresponding amino acid residue in another Cas9 polypeptide. In some embodiments, the deaminase (e.g., adenosine deaminase) is inserted to replace amino acid residue 1040 as numbered in the above Cas9 reference sequence, or a corresponding amino acid residue in another Cas9 polypeptide.

[0712] In some embodiments, the deaminase (e.g., adenosine deaminase) is inserted at amino acid residue 1052, or is inserted at amino acid residue 1054, as numbered in the above Cas9 reference sequence, or a corresponding amino acid residue in another Cas9 polypeptide. In some embodiments, the deaminase (e.g., adenosine deaminase) is inserted at the N-terminus of amino acid residue 1052 or is inserted at the N-terminus of amino acid residue 1054, as numbered in the above Cas9 reference sequence, or a corresponding amino acid residue in another Cas9 polypeptide. In some embodiments, the deaminase (e.g., adenosine deaminase) is inserted at the C-terminus of amino acid residue 1052 or is inserted at the C-terminus of amino acid residue 1054, as numbered in the above Cas9 reference sequence, or a corresponding amino acid residue in another Cas9 polypeptide. In some embodiments, the deaminase (e.g., adenosine deaminase) is inserted to replace amino acid residue 1052, or is inserted to replace amino acid residue 1054, as numbered in the above Cas9 reference sequence, or a corresponding amino acid residue in another Cas9 polypeptide.

[0713] In some embodiments, the deaminase (e.g., adenosine deaminase) is inserted at amino acid residue 1067, or is inserted at amino acid residue 1068, or is inserted at amino acid residue 1069, as numbered in the above Cas9 reference sequence, or a corresponding amino acid residue in another Cas9 polypeptide. In some embodiments, the deaminase (e.g., adenosine deaminase) is inserted at the N-terminus of amino acid residue 1067 or is inserted at the N-terminus of amino acid residue 1068 or is inserted at the N-terminus of amino acid residue 1069, as numbered in the above Cas9 reference sequence, or a corresponding amino acid residue in another Cas9 polypeptide. In some embodiments, the deaminase (e.g., adenosine deaminase) is inserted at the C-terminus of amino acid residue 1067 or is inserted at the C-terminus of amino acid residue 1068 or is inserted at the C-terminus of amino acid residue 1069, as numbered in the above Cas9 reference sequence, or a corresponding amino acid residue in another Cas9 polypeptide. In some embodiments, the deaminase (e.g., adenosine deaminase) is inserted to replace amino acid residue 1067, or is inserted to replace amino acid residue 1068, or is inserted to replace amino acid residue 1069, as numbered in the above Cas9 reference sequence, or a corresponding amino acid residue in another Cas9 polypeptide.

[0714] In some embodiments, the deaminase (e.g., adenosine deaminase) is inserted at amino acid residue 1246, or is inserted at amino acid residue 1247, or is inserted at amino acid residue 1248, as numbered in the above Cas9 reference sequence, or a corresponding amino acid residue in another Cas9 polypeptide. In some embodiments, the deaminase (e.g., adenosine deaminase) is inserted at the N-terminus of amino acid residue 1246 or is inserted at the N-terminus of amino acid residue 1247 or is inserted at the N-terminus of amino acid residue 1248, as numbered in the above Cas9 reference sequence, or a corresponding amino acid residue in another Cas9 polypeptide. In some embodiments, the deaminase (e.g., adenosine deaminase) is inserted at the C-terminus of amino acid residue 1246 or is inserted at the C-terminus of amino acid residue 1247 or is inserted at the C-terminus of amino acid residue 1248, as numbered in the above Cas9 reference sequence, or a corresponding amino acid residue in another Cas9 polypeptide. In some embodiments, the deaminase (e.g., adenosine deaminase) is inserted to replace amino acid residue 1246, or is inserted to replace amino acid residue 1247, or is inserted to replace amino acid residue 1248, as numbered in the above Cas9 reference sequence, or a corresponding amino acid residue in another Cas9 polypeptide.

[0715] In some embodiments, a heterologous polypeptide (e.g., deaminase) is inserted in a flexible loop of a Cas9 polypeptide. The flexible loop portions can be selected from the group consisting of 530-537, 569-570, 686-691, 943-947, 1002-1025, 1052-1077, 1232-1247, or 1298-1300 as numbered in the above Cas9 reference sequence, or a corresponding amino acid residue in another Cas9 polypeptide. The flexible loop portions can be selected from the group consisting of: 1-529, 538-568, 580-685, 692-942, 948-1001, 1026-1051, 1078-1231, or 1248-1297 as numbered in the above Cas9 reference sequence, or a corresponding amino acid residue in another Cas9 polypeptide.

[0716] A heterologous polypeptide (e.g., adenine deaminase) can be inserted into a Cas9 polypeptide region corresponding to amino acid residues: 1017-1069, 1242-1247, 1052-1056, 1060-1077, 1002-1003, 943-947, 530-537, 568-579, 686-691,1242-1247, 1298-1300, 1066-1077, 1052-1056, or 1060-1077 as numbered in the above Cas9 reference sequence, or a corresponding amino acid residue in another Cas9 polypeptide.

[0717] A heterologous polypeptide (e.g., adenine deaminase) can be inserted in place of a deleted region of a Cas9 polypeptide. The deleted region can correspond to an N-terminal or C-terminal portion of the Cas9 polypeptide. In some embodiments, the deleted region corresponds to residues 792-872 as numbered in the above Cas9 reference sequence, or a corresponding amino acid residue in another Cas9 polypeptide. In some embodiments, the deleted region corresponds to residues 792-906 as numbered in the above Cas9 reference sequence, or a corresponding amino acid residue in another Cas9 polypeptide. In some embodiments, the deleted region corresponds to residues 2-791 as numbered in the above Cas9 reference sequence, or a corresponding amino acid residue in another Cas9 polypeptide. In some embodiments, the deleted region corresponds to residues 1017-1069 as numbered in the above Cas9 reference sequence, or corresponding amino acid residues thereof.

[0718] Exemplary internal fusions base editors are provided in Table 10A below:

TABLE 10A
Insertion loci in Cas9 proteins

| BE ID | Modification | Other ID |
|---|---|---|
| IBE001 | Cas9 TadA ins 1015 | ISLAY01 |
| IBE002 | Cas9 TadA ins 1022 | ISLAY02 |
| IBE003 | Cas9 TadA ins 1029 | ISLAY03 |
| IBE004 | Cas9 TadA ins 1040 | ISLAY04 |
| IBE005 | Cas9 TadA ins 1068 | ISLAY05 |
| IBE006 | Cas9 TadA ins 1247 | ISLAY06 |
| IBE007 | Cas9 TadA ins 1054 | ISLAY07 |
| IBE008 | Cas9 TadA ins 1026 | ISLAY08 |
| IBE009 | Cas9 TadA ins 768 | ISLAY09 |
| IBE020 | delta HNH TadA 792 | ISLAY20 |
| IBE021 | N-term fusion single TadA helix truncated 165-end | ISLAY21 |
| IBE029 | TadA-Circular Permutant116 ins1067 | ISLAY29 |
| IBE031 | TadA-Circular Permutant 136 ins1248 | ISLAY31 |
| IBE032 | TadA-Circular Permutant 136ins 1052 | ISLAY32 |
| IBE035 | delta 792-872 TadA ins | ISLAY35 |
| IBE036 | delta 792-906 TadA ins | ISLAY36 |
| IBE043 | TadA-Circular Permutant 65 ins1246 | ISLAY43 |
| IBE044 | TadA ins C-term truncate2 791 | ISLAY44 |

[0719] A heterologous polypeptide (e.g., deaminase) can be inserted within a structural or functional domain of a Cas9 polypeptide. A heterologous polypeptide (e.g., deaminase) can be inserted between two structural or functional domains of a Cas9 polypeptide. A heterologous polypeptide (e.g., deaminase) can be inserted in place of a structural or functional domain of a Cas9 polypeptide, for example, after deleting the domain from the Cas9 polypeptide. The structural or functional domains of a Cas9 polypeptide can include, for example, RuvC I, RuvC II, RuvC III, Rec1, Rec2, PI, or HNH.

[0720] In some embodiments, the Cas9 polypeptide lacks one or more domains selected from the group consisting of: RuvC I, RuvC II, RuvC III, Rec1, Rec2, PI, or HNH domain. In some embodiments, the Cas9 polypeptide lacks a nuclease domain. In some embodiments, the Cas9 polypeptide lacks an HNH domain. In some embodiments, the Cas9 polypeptide lacks a portion of the HNH domain such that the Cas9 polypeptide has reduced or abolished HNH activity.

[0721] In some embodiments, the Cas9 polypeptide comprises a deletion of the nuclease domain, and the deaminase is inserted to replace the nuclease domain. In some embodiments, the HNH domain is deleted and the deaminase is inserted in its place. In some embodiments, one or more of the RuvC domains is deleted and the deaminase is inserted in its place.

[0722] A fusion protein comprising a heterologous polypeptide can be flanked by a N-terminal and a C-terminal fragment of a napDNAbp. In some embodiments, the fusion protein comprises a deaminase flanked by a N-terminal fragment and a C-terminal fragment of a Cas9 polypeptide. The N terminal fragment or the C terminal fragment can bind the target polynucleotide sequence. The C-terminus of the N terminal fragment or the N-terminus of the C terminal fragment can comprise a part of a flexible loop of a Cas9 polypeptide. The C-terminus of the N terminal fragment or the N-terminus of the C terminal fragment can comprise a part of an alpha-helix structure of the Cas9 polypeptide. The N-terminal fragment or the C-terminal fragment can comprise a DNA binding domain. The N-terminal fragment or the C-terminal fragment can comprise a RuvC domain. The N-terminal fragment or the C-terminal fragment can comprise an HNH domain. In some embodiments, neither of the N-terminal fragment and the C-terminal fragment comprises an HNH domain.

[0723] In some embodiments, the C-terminus of the N terminal Cas9 fragment comprises an amino acid that is in proximity to a target nucleobase when the fusion protein deaminates the target nucleobase. In some embodiments, the N-terminus of the C terminal Cas9 fragment comprises an amino acid that is in proximity to a target nucleobase when the fusion protein deaminates the target nucleobase. The insertion location of different deaminases can be different in order to have proximity between the target nucleobase and an amino acid in the C-terminus of the N terminal Cas9 fragment or the N-terminus of the C terminal Cas9 fragment. For example, the insertion position of an ABE can be at an amino acid residue selected from the group consisting of: 1015, 1022, 1029, 1040, 1068, 1247, 1054, 1026, 768, 1067, 1248, 1052, and 1246 as numbered in the above Cas9 reference sequence, or a corresponding amino acid residue in another Cas9 polypeptide.

[0724] The N-terminal Cas9 fragment of a fusion protein (i.e. the N-terminal Cas9 fragment flanking the deaminase in a fusion protein) can comprise the N-terminus of a Cas9 polypeptide. The N-terminal Cas9 fragment of a fusion protein can comprise a length of at least about: 100, 200, 300, 400, 500, 600, 700, 800, 900, 1000, 1100, 1200, or 1300 amino acids. The N-terminal Cas9 fragment of a fusion protein can comprise a sequence corresponding to amino acid residues: 1-56, 1-95, 1-200, 1-300, 1-400, 1-500, 1-600, 1-700, 1-718, 1-765, 1-780, 1-906, 1-918, or 1-1100 as numbered in the above Cas9 reference sequence, or a corresponding amino acid residue in another Cas9 polypeptide. The N-terminal Cas9 fragment can comprise a sequence comprising at least: 85%, at least 90%, at least 91%, at least 92%, at least 93%, at least 94%, at least 95%, at least 96%, at least 97%, at least 98%, at least 99%, or at least 99.5% sequence identity to amino acid residues: 1-56, 1-95, 1-200, 1-300, 1-400, 1-500, 1-600, 1-700, 1-718, 1-765, 1-780, 1-906, 1-918, or 1-1100 as numbered in the above Cas9 reference sequence, or a corresponding amino acid residue in another Cas9 polypeptide.

[0725] The C-terminal Cas9 fragment of a fusion protein (i.e. the C-terminal Cas9 fragment flanking the deaminase in a fusion protein) can comprise the C-terminus of a Cas9 polypeptide. The C-terminal Cas9 fragment of a fusion protein can comprise a length of at least about: 100, 200, 300, 400, 500, 600, 700, 800, 900, 1000, 1100, 1200, or 1300 amino acids. The C-terminal Cas9 fragment of a fusion protein can comprise a sequence corresponding to amino acid residues: 1099-1368, 918-1368, 906-1368, 780-1368, 765-1368, 718-1368, 94-1368, or 56-1368 as numbered in the above Cas9 reference sequence, or a corresponding amino acid residue in another Cas9 polypeptide. The N-terminal Cas9 fragment can comprise a sequence comprising at least: 85%, at least 90%, at least 91%, at least 92%, at least 93%, at least 94%, at least 95%, at least 96%, at least 97%, at least 98%, at least 99%, or at least 99.5% sequence identity to amino acid residues: 1099-1368, 918-1368, 906-1368, 780-1368, 765-1368, 718-1368, 94-1368, or 56-1368 as numbered in the above Cas9 reference sequence, or a corresponding amino acid residue in another Cas9 polypeptide.

[0726] The N-terminal Cas9 fragment and C-terminal Cas9 fragment of a fusion protein taken together may not correspond to a full-length naturally occurring Cas9 polypeptide sequence, for example, as set forth in the above Cas9 reference sequence.

[0727] The fusion protein described herein can effect targeted deamination with reduced deamination at non-target sites (e.g., off-target sites), such as reduced genome wide spurious deamination. The fusion protein described herein can effect targeted deamination with reduced bystander deamination at non-target sites. The undesired deamination or off-target deamination can be reduced by at least 30%, at least 40%, at least 50%, at least 60%, at least 70%, at least 80%, at least 90%, at least 95%, or at least 99% compared with, for example, an end terminus fusion protein comprising the deaminase fused to a N terminus or a C terminus of a Cas9 polypeptide. The undesired deamination or off-target deamination can be reduced by at least one-fold, at least two-fold, at least three-fold, at least four-fold, at least five-fold, at least tenfold, at least fifteen fold, at least twenty fold, at least thirty fold, at least forty fold, at least fifty fold, at least 60 fold, at least 70 fold, at least 80 fold, at least 90 fold, or at least hundred fold, compared with, for example, an end terminus fusion protein comprising the deaminase fused to a N terminus or a C terminus of a Cas9 polypeptide.

[0728] In some embodiments, the deaminase (e.g., adenosine deaminase) of the fusion protein deaminates no more than two nucleobases within the range of an R-loop. In some embodiments, the deaminase of the fusion protein deaminates no more than three nucleobases within the range of the R-loop. In some embodiments, the deaminase of the fusion protein deaminates no more than 2, 3, 4, 5, 6, 7, 8, 9, or 10 nucleobases within the range of the R-loop. An R-loop is a three-stranded nucleic acid structure including a DNA:RNA hybrid, a DNA:DNA or an RNA: RNA complementary structure and the associated with single-stranded DNA. As used herein, an R-loop may be formed when a target polynucleotide is contacted with a CRISPR complex or a base editing complex, wherein a portion of a guide polynucleotide, e.g. a guide RNA, hybridizes with and displaces with a portion of a target polynucleotide, e.g. a target DNA. In some embodiments, an R-loop comprises a hybridized region of a spacer sequence and a target DNA complementary sequence. An R-loop region may be of about 5, 6, 7, 8, 9, 10, 11, 12, 13, 14, 15, 16, 17, 18, 19, 20, 21, 22, 23, 24, 25, 26, 27, 28, 29, 30, 31, 32, 33, 34, 35, 36, 37, 38, 39, 40, 41, 42, 43, 44, 45, 46, 47, 48, 49, or 50 nucleobase pairs in length. In some embodiments, the R-loop region is about 20 nucleobase pairs in length. It should be understood that, as used herein, an R-loop region is not limited to the target DNA strand that hybridizes with the guide polynucleotide. For example, editing of a target nucleobase within an R-loop region may be to a DNA strand that comprises the complementary strand to a guide RNA, or may be to a DNA strand that is the opposing strand of the strand complementary to the guide RNA. In some embodiments, editing in the region of the R-loop comprises editing a nucleobase on non-complementary strand (protospacer strand) to a guide RNA in a target DNA sequence.

[0729] The fusion protein described herein can effect target deamination in an editing window different from canonical base editing. In some embodiments, a target nucleobase is from about 1 to about 20 bases upstream of a PAM sequence in the target polynucleotide sequence. In some embodiments, a target nucleobase is from about 2 to about 12 bases upstream of a PAM sequence in the target polynucleotide sequence. In some embodiments, a target nucleobase is from about 1 to 9 base pairs, about 2 to 10 base pairs, about 3 to 11 base pairs, about 4 to 12 base pairs, about 5 to 13 base pairs, about 6 to 14 base pairs, about 7 to 15 base pairs, about 8 to 16 base pairs, about 9 to 17 base pairs, about 10 to 18 base pairs, about 11 to 19 base pairs, about 12 to 20 base pairs, about 1 to 7 base pairs, about 2 to 8 base pairs, about 3 to 9 base pairs, about 4 to 10 base pairs, about 5 to 11 base pairs, about 6 to 12 base pairs, about 7 to 13 base pairs, about 8 to 14 base pairs, about 9 to 15 base pairs, about 10 to 16 base pairs, about 11 to 17 base pairs, about 12 to 18 base pairs, about 13 to 19 base pairs, about 14 to 20 base pairs, about 1 to 5 base pairs, about 2 to 6 base pairs, about 3 to 7 base pairs, about 4 to 8 base pairs, about 5 to 9 base pairs, about 6 to 10 base pairs, about 7 to 11 base pairs, about 8 to 12 base pairs, about 9 to 13 base pairs, about 10 to 14 base pairs, about 11 to 15 base pairs, about 12 to 16 base pairs, about 13 to 17 base pairs, about 14 to 18 base pairs, about 15 to 19 base pairs, about 16 to 20 base pairs, about 1 to 3 base pairs, about 2 to 4 base pairs, about 3 to 5 base pairs, about 4 to 6 base pairs, about 5 to 7 base pairs, about 6 to 8 base pairs, about 7 to 9 base pairs, about 8 to 10 base pairs, about 9 to 11 base pairs, about 10 to 12 base pairs, about 11 to 13 base pairs, about 12 to 14 base pairs, about 13 to 15 base pairs, about 14 to 16 base pairs, about 15 to 17 base pairs, about 16 to 18 base pairs, about 17 to 19 base pairs, about 18 to 20 base pairs away or upstream of the PAM sequence. In some embodiments, a target nucleobase is about 1, 2, 3, 4, 5, 6, 7, 8, 9, 10, 11, 12, 13, 14, 15, 16, 17, 18, 19, 20, or more base pairs away from or upstream of the PAM sequence. In some embodiments, a target nucleobase is about 1, 2, 3, 4, 5, 6, 7, 8, or 9 base pairs upstream of the PAM sequence. In some embodiments, a target nucleobase is about 2, 3, 4, or 6 base pairs upstream of the PAM sequence.

[0730] The fusion protein can comprise more than one heterologous polypeptide. For example, the fusion protein can additionally comprise one or more UGI domains and/or one or more nuclear localization signals. The two or more heterologous domains can be inserted in tandem. The two or more heterologous domains can be inserted at locations such that they are not in tandem in the NapDNAbp.

[0731] A fusion protein can comprise a linker between the deaminase and the napDNAbp polypeptide. The linker can be a peptide or a non-peptide linker. For example, the linker can be an XTEN, (GGGS)n, (GGGGS)n, (G)n, (EAAAK)n, (GGS)n, SGSETPGTSESATPES. In some embodiments, the fusion protein comprises a linker between the N-terminal Cas9 fragment and the deaminase. In some embodiments, the fusion protein comprises a linker between the C-terminal Cas9 fragment and the deaminase. In some embodiments, the N-terminal and C-terminal fragments of napDNAbp are connected to the deaminase with a linker. In some embodiments, the N-terminal and C-terminal fragments are joined to the deaminase domain without a linker. In some embodiments, the fusion protein comprises a linker between the N-terminal Cas9 fragment and the deaminase, but does not comprise a linker between the C-terminal Cas9 fragment and the deaminase. In some embodiments, the fusion protein comprises a linker between the C-terminal Cas9 fragment and the deaminase, but does not comprise a linker between the N-terminal Cas9 fragment and the deaminase.

[0732] In other embodiments, the N- or C-terminal fragments of the Cas12 polypeptide comprise a nucleic acid programmable DNA binding domain or a RuvC domain. In other embodiments, the fusion protein contains a linker between the Cas12 polypeptide and the catalytic domain. In other embodiments, the amino acid sequence of the linker is GGSGGS or GSSGSETPGTSESATPESSG. In other embodiments, the linker is a rigid linker. In other embodiments of the above aspects, the linker is encoded by GGAGGCTCTGGAGGAAGC or GGCTCTTCTGGATCTGAAACACCTGGCACAAGCGAGAGCGCCACCCCTGAGAGC TCTGGC.

[0733] Fusion proteins comprising a heterologous catalytic domain flanked by N- and C-terminal fragments of a Cas9 or Cas12 polypeptide are also useful for base editing in the methods as described herein. Fusion proteins comprising Cas9 or Cas12 and one or more deaminase domains, e.g., adenosine deaminase, or comprising an adenosine deaminase domain flanked by Cas9 or Cas12 sequences are also useful for highly specific and efficient base editing of target sequences. In an embodiment, a chimeric Cas9 or Cas12 fusion protein contains a heterologous catalytic domain inserted within a Cas12 polypeptide.

[0734] In various embodiments, the catalytic domain has DNA modifying activity (e.g., deaminase activity), such as adenosine deaminase activity. In some embodiments, the adenosine deaminase is a TadA (e.g., TadA7.10). In some embodiments, the TadA is a TadA*8. In other embodiments, the fusion protein contains one or more catalytic domains. In other embodiments, at least one of the one or more catalytic domains is inserted within the Cas12 polypeptide or is fused at the Cas12 N-terminus or C-terminus. In other embodiments, at least one of the one or more catalytic domains is inserted within a loop, an alpha helix region, an unstructured portion, or a solvent accessible portion of the Cas12 polypeptide. In other embodiments, the Cas12 polypeptide is Cas12a, Cas12b, Cas12c, Cas12d, Cas12e, Cas12g, Cas12h, or Cas12i. In other embodiments, the Cas12 polypeptide has at least about 85% amino acid sequence identity to Bacillus hisashii Cas12b, Bacillus thermoamylovorans Cas12b, Bacillus sp. V3-13 Cas12b, or Alicyclobacillus acidiphilus Cas12b. In other embodiments, the Cas12 polypeptide has at least about 90% amino acid sequence identity to Bacillus hisashii Cas12b, Bacillus thermoamylovorans Cas12b, Bacillus sp. V3-13 Cas12b, or Alicyclobacillus acidiphilus Cas12b. In other embodiments, the Cas12 polypeptide has at least about 95% amino acid sequence identity to Bacillus hisashii Cas12b, Bacillus thermoamylovorans Cas12b, Bacillus sp. V3-13 Cas12b, or Alicyclobacillus acidiphilus Cas12b. In other embodiments, the Cas12 polypeptide contains or consists essentially of a fragment of Bacillus hisashii Cas12b, Bacillus thermoamylovorans Cas12b, Bacillus sp. V3-13 Cas12b, or Alicyclobacillus acidiphilus Cas12b.

[0735] In other embodiments, the catalytic domain is inserted between amino acid positions 153-154, 255-256, 306-307, 980-981, 1019-1020, 534-535, 604-605, or 344-345 of BhCas12b or a corresponding amino acid residue of Cas12a, Cas12c, Cas12d, Cas12e, Cas12g, Cas12h, or Cas12i. In other embodiments, the catalytic domain is inserted between amino acids P153 and 5154 of BhCas12b. In other embodiments, the catalytic domain is inserted between amino acids K255 and E256 of BhCas12b. In other embodiments, the catalytic domain is inserted between amino acids D980 and G981 of BhCas12b. In other embodiments, the catalytic domain is inserted between amino acids K1019 and L1020 of BhCas12b. In other embodiments, the catalytic domain is inserted between amino acids F534 and P535 of BhCas12b. In other embodiments, the catalytic domain is inserted between amino acids K604 and G605 of BhCas12b. In other embodiments, the catalytic domain is inserted between amino acids H344 and F345 of BhCas12b. In other embodiments, catalytic domain is inserted between amino acid positions 147 and 148, 248 and 249, 299 and 300, 991 and 992, or 1031 and 1032 of BvCas12b or a corresponding amino acid residue of Cas12a, Cas12c, Cas12d, Cas12e, Cas12g, Cas12h, or Cas12i. In other embodiments, the catalytic domain is inserted between amino acids P147 and D148 of BvCas12b. In other embodiments, the catalytic domain is inserted between amino acids G248 and G249 of BvCas12b. In other embodiments, the catalytic domain is inserted between amino acids P299 and E300 of BvCas12b. In other embodiments, the catalytic domain is inserted between amino acids G991 and E992 of BvCas12b. In other embodiments, the catalytic domain is inserted between amino acids K1031 and M1032 of BvCas12b. In other embodiments, the catalytic domain is inserted between amino acid positions 157 and 158, 258 and 259, 310 and 311, 1008 and 1009, or 1044 and 1045 of AaCas12b or a corresponding amino acid residue of Cas12a, Cas12c, Cas12d, Cas12e, Cas12g, Cas12h, or Cas12i. In other embodiments, the catalytic domain is inserted between amino acids P157 and G158 of AaCas12b. In other embodiments, the catalytic domain is inserted between amino acids V258 and G259 of AaCas12b. In other embodiments, the catalytic domain is inserted between amino acids D310 and P311 of AaCas12b. In other embodiments, the catalytic domain is inserted between amino acids G1008 and E1009 of AaCas12b. In other embodiments, the catalytic domain is inserted between amino acids G1044 and K1045 at of AaCas12b.

[0736] In other embodiments, the fusion protein contains a nuclear localization signal (e.g., a bipartite nuclear localization signal). In other embodiments, the amino acid sequence of the nuclear localization signal is MAPKKKRKVGIHGVPAA. In other embodiments of the above aspects, the nuclear localization signal is encoded by the following sequence: ATGGCCCCAAAGAAGAAGCGGAAGGTCGGTATCCACGGAGTCCCAGCAGCC. In other embodiments, the Cas12b polypeptide contains a mutation that silences the catalytic activity of a RuvC domain. In other embodiments, the Cas12b polypeptide contains D574A, D829A and/or D952A mutations. In other embodiments, the fusion protein further contains a tag (e.g., an influenza hemagglutinin tag).

[0737] In some embodiments, the fusion protein comprises a napDNAbp domain (e.g., Cas12-derived domain) with an internally fused nucleobase editing domain (e.g., all or a portion of a deaminase domain, e.g., an adenosine deaminase domain). In some embodiments, the napDNAbp is a Cas12b. In some embodiments, the base editor comprises a BhCas12b domain with an internally fused TadA*8 domain inserted at the loci provided in Table 10B.

TABLE 10B
Insertion loci in Cas12b proteins

| BhCas12b | Insertion site | Inserted between aa |
|---|---|---|
| position 1 | 153 | PS |
| position 2 | 255 | KE |
| position 3 | 306 | DE |
| position 4 | 980 | DG |
| position 5 | 1019 | KL |
| position 6 | 534 | FP |
| position 7 | 604 | KG |
| position 8 | 344 | HF |
| BvCas12b | Insertion site | Inserted between aa |
| position 1 | 147 | PD |
| position 2 | 248 | GG |
| position 3 | 299 | PE |
| position 4 | 991 | GE |
| position 5 | 1031 | KM |
| AaCas12b | Insertion site | Inserted between aa |
| position 1 | 157 | PG |
| position 2 | 258 | VG |
| position 3 | 310 | DP |
| position 4 | 1008 | GE |
| position 5 | 1044 | GK |

[0738] By way of nonlimiting example, an adenosine deaminase (e.g., ABE8.13) may be inserted into a BhCas12b to produce a fusion protein (e.g., ABE8.13-BhCas12b) that effectively edits a nucleic acid sequence. Exemplary, yet nonlimiting, fusion proteins are described in U.S. Provisional Application Nos. 62/852,228 and 62/852,224, the contents of which are incorporated by reference herein in their entireties.

### Methods for Editing Nucleic Acids

[0739] Some aspects of the disclosure provide methods for editing a nucleic acid. In some embodiments, the method is a method for editing a nucleobase of a nucleic acid molecule encoding a protein (e.g., a base pair of a double-stranded DNA sequence). In some embodiments, the method comprises the steps of: a) contacting a target region of a nucleic acid (e.g., a double-stranded DNA sequence) with a complex comprising a base editor and a guide nucleic acid (e.g., gRNA), b) inducing strand separation of said target region, c) converting a first nucleobase of said target nucleobase pair in a single strand of the target region to a second nucleobase, and d) cutting no more than one strand of said target region using the nCas9, where a third nucleobase complementary to the first nucleobase base is replaced by a fourth nucleobase complementary to the second nucleobase. In some embodiments, the method results in less than 20% indel formation in the nucleic acid. It should be appreciated that in some embodiments, step b is omitted. In some embodiments, the method results in less than 19%, 18%, 16%, 14%, 12%, 10%, 8%, 6%, 4%, 2%, 1%, 0.5%, 0.2%, or less than 0.1% indel formation. In some embodiments, the method further comprises replacing the second nucleobase with a fifth nucleobase that is complementary to the fourth nucleobase, thereby generating an intended edited base pair (e.g., G•C to A•T). In some embodiments, at least 5% of the intended base pairs are edited. In some embodiments, at least 10%, 15%, 20%, 25%, 30%, 35%, 40%, 45%, or 50% of the intended base pairs are edited.

[0740] In some embodiments, the ratio of intended products to unintended products in the target nucleotide is at least 2:1, 5:1, 10:1, 20:1, 30:1, 40:1, 50:1, 60:1, 70:1, 80:1, 90:1, 100:1, or 200:1, or more. In some embodiments, the ratio of intended mutation to indel formation is greater than 1:1, 10:1, 50:1, 100:1, 500:1, or 1000:1, or more. In some embodiments, the cut single strand (nicked strand) is hybridized to the guide nucleic acid. In some embodiments, the cut single strand is opposite to the strand comprising the first nucleobase. In some embodiments, the base editor comprises a dCas9 domain. In some embodiments, the base editor protects or binds the non-edited strand. In some embodiments, the intended edited base pair is upstream of a PAM site. In some embodiments, the intended edited base pair is 1, 2, 3, 4, 5, 6, 7, 8, 9, 10, 11, 12, 13, 14, 15, 16, 17, 18, 19, or 20 nucleotides upstream of the PAM site. In some embodiments, the intended edited base pair is downstream of a PAM site. In some embodiments, the intended edited base pair is 1, 2, 3, 4, 5, 6, 7, 8, 9, 10, 11, 12, 13, 14, 15, 16, 17, 18, 19, or 20 nucleotides downstream stream of the PAM site. In some embodiments, the method does not require a canonical (e.g., NGG) PAM site. In some embodiments, the nucleobase editor comprises a linker. In some embodiments, the linker is 1-25 amino acids in length. In some embodiments, the linker is 5-20 amino acids in length. In some embodiments, linker is 10, 11, 12, 13, 14, 15, 16, 17, 18, 19, or 20 amino acids in length. In one embodiment, the linker is 32 amino acids in length. In another embodiment, a “long linker” is at least about 60 amino acids in length. In other embodiments, the linker is between about 3-100 amino acids in length. In some embodiments, the target region comprises a target window, wherein the target window comprises the target nucleobase pair. In some embodiments, the target window comprises 1-10 nucleotides. In some embodiments, the target window is 1-9, 1-8, 1-7, 1-6, 1-5, 1-4, 1-3, 1-2, or 1 nucleotides in length. In some embodiments, the target window is 1, 2, 3, 4, 5, 6, 7, 8, 9, 10, 11, 12, 13, 14, 15, 16, 17, 18, 19, or 20 nucleotides in length. In some embodiments, the intended edited base pair is within the target window. In some embodiments, the target window comprises the intended edited base pair. In some embodiments, the method is performed using any of the base editors provided herein.

[0741] In some embodiments, the disclosure provides methods for editing a nucleotide (e.g., SNP in a gene encoding a protein). In some embodiments, the disclosure provides a method for editing a nucleobase pair of a double-stranded DNA sequence. In some embodiments, the method comprises a) contacting a target region of the double-stranded DNA sequence with a complex comprising a base editor and a guide nucleic acid (e.g., gRNA), where the target region comprises a target nucleobase pair, b) inducing strand separation of said target region, c) converting a first nucleobase of said target nucleobase pair in a single strand of the target region to a second nucleobase, d) cutting no more than one strand of said target region, wherein a third nucleobase complementary to the first nucleobase base is replaced by a fourth nucleobase complementary to the second nucleobase, and the second nucleobase is replaced with a fifth nucleobase that is complementary to the fourth nucleobase, thereby generating an intended edited base pair, wherein the efficiency of generating the intended edited base pair is at least 5%. It should be appreciated that in some embodiments, step b is omitted. In some embodiments, at least 5% of the intended base pairs are edited. In some embodiments, at least 10%, 15%, 20%, 25%, 30%, 35%, 40%, 45%, or 50% of the intended base pairs are edited. In some embodiments, the method causes less than 19%, 18%, 16%, 14%, 12%, 10%, 8%, 6%, 4%, 2%, 1%, 0.5%, 0.2%, or less than 0.1% indel formation. In some embodiments, the ratio of intended product to unintended products at the target nucleotide is at least 2:1, 5:1, 10:1, 20:1, 30:1, 40:1, 50:1, 60:1, 70:1, 80:1, 90:1, 100:1, or 200:1, or more. In some embodiments, the ratio of intended mutation to indel formation is greater than 1:1, 10:1, 50:1, 100:1, 500:1, or 1000:1, or more. In some embodiments, the cut single strand is hybridized to the guide nucleic acid. In some embodiments, the cut single strand is opposite to the strand comprising the first nucleobase. In some embodiments, the intended edited base pair is upstream of a PAM site. In some embodiments, the intended edited base pair is 1, 2, 3, 4, 5, 6, 7, 8, 9, 10, 11, 12, 13, 14, 15, 16, 17, 18, 19, or 20 nucleotides upstream of the PAM site. In some embodiments, the intended edited base pair is downstream of a PAM site. In some embodiments, the intended edited base pair is 1, 2, 3, 4, 5, 6, 7, 8, 9, 10, 11, 12, 13, 14, 15, 16, 17, 18, 19, or 20 nucleotides downstream stream of the PAM site. In some embodiments, the method does not require a canonical (e.g., NGG) PAM site. In some embodiments, the linker is 1-25 amino acids in length. In some embodiments, the linker is 5-20 amino acids in length. In some embodiments, the linker is 10, 11, 12, 13, 14, 15, 16, 17, 18, 19, or 20 amino acids in length. In some embodiments, the target region comprises a target window, wherein the target window comprises the target nucleobase pair. In some embodiments, the target window comprises 1-10 nucleotides. In some embodiments, the target window is 1-9, 1-8, 1-7, 1-6, 1-5, 1-4, 1-3, 1-2, or 1 nucleotides in length. In some embodiments, the target window is 1, 2, 3, 4, 5, 6, 7, 8, 9, 10, 11, 12, 13, 14, 15, 16, 17, 18, 19, or 20 nucleotides in length. In some embodiments, the intended edited base pair occurs within the target window. In some embodiments, the target window comprises the intended edited base pair. In some embodiments, the nucleobase editor is any one of the base editors provided herein.

### Expression of Fusion Proteins in a Host Cell

[0742] Fusion proteins of the invention comprising an adenosine deaminase variant may be expressed in virtually any host cell of interest, including but not limited to bacteria, yeast, fungi, insects, plants, and animal cells using routine methods known to the skilled artisan. For example, a DNA encoding an adenosine deaminase of the invention can be cloned by designing suitable primers for the upstream and downstream of CDS based on the cDNA sequence. The cloned DNA may be directly, or after digestion with a restriction enzyme when desired, or after addition of a suitable linker and/or a nuclear localization signal ligated with a DNA encoding one or more additional components of a base editing system. The base editing system is translated in a host cell to form a complex.

[0743] A DNA encoding a protein domain described herein can be obtained by chemically synthesizing the DNA, or by connecting synthesized partly overlapping oligoDNA short chains by utilizing the PCR method and the Gibson Assembly method to construct a DNA encoding the full length thereof. The advantage of constructing a full-length DNA by chemical synthesis or a combination of PCR method or Gibson Assembly method is that the codon to be used can be designed in CDS full-length according to the host into which the DNA is introduced. In the expression of a heterologous DNA, the protein expression level is expected to increase by converting the DNA sequence thereof to a codon highly frequently used in the host organism. As the data of codon use frequency in host to be used, for example, the genetic code use frequency database (http://www.kazusa.or.jp/codon/index.html) disclosed in the home page of Kazusa DNA Research Institute can be used, or documents showing the codon use frequency in each host may be referred to. By reference to the obtained data and the DNA sequence to be introduced, codons showing low use frequency in the host from among those used for the DNA sequence may be converted to a codon coding the same amino acid and showing high use frequency.

[0744] An expression vector containing a DNA encoding a nucleic acid sequence-recognizing module and/or a nucleic acid base converting enzyme can be produced, for example, by linking the DNA to the downstream of a promoter in a suitable expression vector.

[0745] As the expression vector, Escherichia coli-derived plasmids (e.g., pBR322, pBR325, pUC12, pUC13); Bacillus subtilis-derived plasmids (e.g., pUB110, pTP5, pC194); yeast-derived plasmids (e.g., pSH19, pSH15); insect cell expression plasmids (e.g., pFast-Bac); animal cell expression plasmids (e.g., pA1-11, pXT1, pRc/CMV, pRc/RSV, pcDNAI/Neo); bacteriophages such as .lamda.phage and the like; insect virus vectors such as baculovirus and the like (e.g., BmNPV, AcNPV); animal virus vectors such as retrovirus, vaccinia virus, adenovirus and the like, and the like are used.

[0746] As the promoter, any promoter appropriate for a host to be used for gene expression can be used. In a conventional method using DSB, since the survival rate of the host cell sometimes decreases markedly due to the toxicity, it is desirable to increase the number of cells by the start of the induction by using an inductive promoter. However, since sufficient cell proliferation can also be afforded by expressing the nucleic acid-modifying enzyme complex of the present invention, a constitution promoter can also be used without limitation.

[0747] For example, when the host is an animal cell, SR.alpha. promoter, SV40 promoter, LTR promoter, CMV (cytomegalovirus) promoter, RSV (Rous sarcoma virus) promoter,

[0748] MoMuLV (Moloney mouse leukemia virus) LTR, HSV-TK (simple herpes virus thymidine kinase) promoter and the like are used. Of these, CMV promoter, SR.alpha. promoter and the like are preferable.

[0749] When the host is Escherichia coli, trp promoter, lac promoter, recA promoter, lamda.P.sub.L promoter, 1pp promoter, T7 promoter and the like are preferable.

[0750] When the host is genus Bacillus, SPO1 promoter, SPO2 promoter, penP promoter and the like are preferable.

[0751] When the host is a yeast, Gal1/10 promoter, PHOS promoter, PGK promoter, GAP promoter, ADH promoter and the like are preferable.

[0752] When the host is an insect cell, polyhedrin promoter, P10 promoter and the like are preferable.

[0753] When the host is a plant cell, CaMV35S promoter, CaMV19S promoter, NOS promoter and the like are preferable.

[0754] As the expression vector, besides those mentioned above, one containing enhancer, splicing signal, terminator, polyA addition signal, a selection marker such as drug resistance gene, auxotrophic complementary gene and the like, replication origin and the like on demand can be used.

[0755] An RNA encoding a protein domain described herein can be prepared by, for example, transcription to mRNA in a vitro transcription system known per se by using a vector encoding DNA encoding the above-mentioned nucleic acid sequence-recognizing module and/or a nucleic acid base converting enzyme as a template.

[0756] A fusion protein of the invention can be intracellularly expressed by introducing an expression vector containing a DNA encoding a nucleic acid sequence-recognizing module and/or a nucleic acid base converting enzyme into a host cell, and culturing the host cell.

[0757] As the host, genus Escherichia, genus Bacillus, yeast, insect cell, insect, animal cell and the like are used.

[0758] As the genus Escherichia, Escherichia coli K12.cndot.DH1 [Proc. Natl. Acad. Sci. USA, 60, 160 (1968)], Escherichia coli JM103 [Nucleic Acids Research, 9, 309 (1981)], Escherichia coli JA221 [Journal of Molecular Biology, 120, 517 (1978)], Escherichia coli HB101 [Journal of Molecular Biology, 41, 459 (1969)], Escherichia coli C600 [Genetics, 39, 440 (1954)] and the like are used.

[0759] As the genus Bacillus, Bacillus subtilis M1114 [Gene, 24, 255 (1983)], Bacillus subtilis 207-21 [Journal of Biochemistry, 95, 87 (1984)] and the like are used.

[0760] As the yeast, Saccharomyces cerevisiae AH22, AH22R.sup.-, NA87-11A, DKD-5D, 20B-12, Schizosaccharomyces pombe NCYC1913, NCYC2036, Pichia pastoris KM71 and the like are used.

[0761] As the insect cell when the virus is AcNPV, cells of cabbage armyworm larva-derived established line (Spodoptera frupperda cell; Sf cell), MG1 cells derived from the mid-intestine of Trichoplusia ni, High Five.TM. cells derived from an egg of Trichoplusia ni, Mamestra brassicae-derived cells, Estigmena acrea-derived cells and the like are used. When the virus is BmNPV, cells of Bombyx mori-derived established line (Bombyx mori N cell; BmN cell) and the like are used as insect cells. As the Sf cell, for example, Sf9 cell (ATCC CRL1711), Sf21 cell [all above, In Vivo, 13, 213-217 (1977)] and the like are used.

[0762] As the insect, for example, larva of Bombyx mori, Drosophila, cricket and the like are used [Nature, 315, 592 (1985)].

[0763] As the animal cell, cell lines such as monkey COS-7 cell, monkey Vero cell, Chinese hamster ovary (CHO) cell, dhfr gene-deficient CHO cell, mouse L cell, mouse AtT-20 cell, mouse myeloma cell, rat GH3 cell, human FL cell and the like, pluripotent stem cells such as iPS cell, ES cell and the like of human and other mammals, and primary cultured cells prepared from various tissues are used. Furthermore, zebrafish embryo, Xenopus oocyte and the like can also be used.

[0764] As the plant cell, suspend cultured cells, callus, protoplast, leaf segment, root segment and the like prepared from various plants (e.g., grain such as rice, wheat, corn and the like, product crops such as tomato, cucumber, eggplant and the like, garden plants such as carnation, Eustoma russellianum and the like, experiment plants such as tobacco, Arabidopsis thaliana and the like, and the like) are used.

[0765] All the above-mentioned host cells may be haploid (monoploid), or polyploid (e.g., diploid, triploid, tetraploid and the like). In the conventional mutation introduction methods, mutation is, in principle, introduced into only one homologous chromosome to produce a hetero gene type. Therefore, desired phenotype is not expressed unless dominant mutation occurs, and homozygousness inconveniently requires labor and time. In contrast, according to the present invention, since mutation can be introduced into any allele on the homologous chromosome in the genome, desired phenotype can be expressed in a single generation even in the case of recessive mutation, which is extremely useful since the problem of the conventional method can be solved.

[0766] An expression vector can be introduced by a known method (e.g., lysozyme method, competent method, PEG method, CaC12 coprecipitation method, electroporation method, the microinjection method, the particle gun method, lipofection method, Agrobacterium method and the like) according to the kind of the host.

[0767] Escherichia coli can be transformed according to the methods described in, for example, Proc. Natl. Acad. Sci. USA, 69, 2110 (1972), Gene, 17, 107 (1982) and the like.

[0768] The genus Bacillus can be introduced into a vector according to the methods described in, for example, Molecular & General Genetics, 168, 111 (1979) and the like.

[0769] A yeast can be introduced into a vector according to the methods described in, for example, Methods in Enzymology, 194, 182-187 (1991), Proc. Natl. Acad. Sci. USA, 75, 1929 (1978) and the like.

[0770] An insect cell and an insect can be introduced into a vector according to the methods described in, for example, Bio/Technology, 6, 47-55 (1988) and the like.

[0771] An animal cell can be introduced into a vector according to the methods described in, for example, Cell Engineering additional volume 8, New Cell Engineering Experiment Protocol, 263-267 (1995) (published by Shujunsha), and Virology, 52, 456 (1973).

[0772] A cell introduced with a vector can be cultured according to a known method according to the kind of the host.

[0773] For example, when Escherichia coli or genus Bacillus is cultured, a liquid medium is preferable as a medium to be used for the culture. The medium preferably contains a carbon source, nitrogen source, inorganic substance and the like necessary for the growth of the transformant. Examples of the carbon source include glucose, dextrin, soluble starch, sucrose and the like; examples of the nitrogen source include inorganic or organic substances such as ammonium salts, nitrate salts, corn steep liquor, peptone, casein, meat extract, soybean cake, potato extract and the like; and examples of the inorganic substance include calcium chloride, sodium dihydrogen phosphate, magnesium chloride and the like. The medium may contain yeast extract, vitamins, growth promoting factor and the like. The pH of the medium is preferably about 5-about 8.

[0774] As a medium for culturing Escherichia coli, for example, M9 medium containing glucose, casamino acid [Journal of Experiments in Molecular Genetics, 431-433, Cold Spring Harbor Laboratory, New York 1972] is preferable. Where necessary, for example, agents such as 3.beta.-indolylacrylic acid may be added to the medium to ensure an efficient function of a promoter. Escherichia coli is cultured at generally about 15-about 43° C. Where necessary, aeration and stirring may be performed.

[0775] The genus Bacillus is cultured at generally about 30-about 40° C. Where necessary, aeration and stirring may be performed.

[0776] Examples of the medium for culturing yeast include Burkholder minimum medium [Proc. Natl. Acad. Sci. USA, 77, 4505 (1980)], SD medium containing 0.5% casamino acid [Proc. Natl. Acad. Sci. USA, 81, 5330 (1984)] and the like. The pH of the medium is preferably about 5-about 8. The culture is performed at generally about 20° C. to about 35° C. Where necessary, aeration and stirring may be performed.

[0777] As a medium for culturing an insect cell or insect, for example, Grace's Insect Medium [Nature, 195, 788 (1962)] containing an additive such as inactivated 10% bovine serum and the like as appropriate and the like are used. The pH of the medium is preferably about 6.2 to about 6.4. The culture is performed at generally about 27° C. Where necessary, aeration and stirring may be performed.

[0778] As a medium for culturing an animal cell, for example, minimum essential medium (MEM) containing about 5-about 20% of fetal bovine serum [Science, 122, 501 (1952)], Dulbecco's modified Eagle medium (DMEM) [Virology, 8, 396 (1959)], RPMI 1640 medium [The Journal of the American Medical Association, 199, 519 (1967)], 199 medium [Proceeding of the Society for the Biological Medicine, 73, 1 (1950)] and the like are used. The pH of the medium is preferably about 6-about 8. The culture is performed at generally about 30° C.-about 40° C. Where necessary, aeration and stirring may be performed.

[0779] As a medium for culturing a plant cell, for example, MS medium, LS medium, B5 medium and the like are used. The pH of the medium is preferably about 5-about 8. The culture is performed at generally about 20° C.-about 30° C. Where necessary, aeration and stirring may be performed.

[0780] When a higher eukaryotic cell, such as animal cell, insect cell, plant cell and the like is used as a host cell, a DNA encoding a base editing system of the present invention (e.g., comprising an adenosine deaminase variant) is introduced into a host cell under the regulation of an inducible promoter (e.g., metallothionein promoter (induced by heavy metal ion), heat shock protein promoter (induced by heat shock), Tet-ON/Tet-OFF system promoter (induced by addition or removal of tetracycline or a derivative thereof), steroid-responsive promoter (induced by steroid hormone or a derivative thereof) etc.), the induction substance is added to the medium (or removed from the medium) at an appropriate stage to induce expression of the nucleic acid-modifying enzyme complex, culture is performed for a given period to carry out a base editing and, introduction of a mutation into a target gene, transient expression of the base editing system can be realized.

[0781] Prokaryotic cells such as Escherichia coli and the like can utilize an inducible promoter. Examples of the inducible promoter include, but are not limited to, lac promoter (induced by IPTG), cspA promoter (induced by cold shock), araBAD promoter (induced by arabinose) and the like.

[0782] Alternatively, the above-mentioned inductive promoter can also be utilized as a vector removal mechanism when higher eukaryotic cells, such as animal cell, insect cell, plant cell and the like are used as a host cell. That is, a vector is mounted with a replication origin that functions in a host cell, and a nucleic acid encoding a protein necessary for replication (e.g.,

[0783] SV40 on and large T antigen, oriP and EBNA-1 etc. for animal cells), of the expression of the nucleic acid encoding the protein is regulated by the above-mentioned inducible promoter. As a result, while the vector is autonomously replicatable in the presence of an induction substance, when the induction substance is removed, autonomous replication is not available, and the vector naturally falls off along with cell division (autonomous replication is not possible by the addition of tetracycline and doxycycline in Tet-OFF system vector).

### Methods of Using Base Editors

[0784] The correction of point mutations in disease-associated genes and alleles provides new strategies for gene correction with applications in therapeutics and basic research.

[0785] The present disclosure provides methods for the treatment of a subject diagnosed with a disease associated with or caused by a point mutation that can be corrected by a base editor system provided herein. For example, in some embodiments, a method is provided that comprises administering to a subject having such a disease, e.g., a disease caused by a genetic mutation, an effective amount of a nucleobase editor (e.g., an adenosine deaminase base editor) that corrects the point mutation in the disease associated gene. The present disclosure provides methods for the treatment of GSD1a that are associated with or caused by a point mutation that can be corrected by deaminase mediated gene editing. Suitable diseases that can be treated with the strategies and fusion proteins provided herein will be apparent to those of skill in the art based on the instant disclosure.

[0786] Provided herein are methods of using a base editor or base editor system for editing a nucleobase in a target nucleotide sequence associated with a disease or disorder. In some embodiments, the activity of the base editor (e.g., comprising an adenosine deaminase and a

[0787] Cas9 domain) results in a correction of the point mutation. In some embodiments, the target DNA sequence comprises a G→A point mutation associated with a disease or disorder, and deamination of the mutant A base results in a sequence that is not associated with a disease or disorder. In some embodiments, the target DNA sequence comprises a T→C point mutation associated with a disease or disorder, and the deamination of the mutant C base results in a sequence that is not associated with a disease or disorder.

[0788] In some embodiments, the target DNA sequence encodes a protein, and the point mutation is in a codon and results in a change in the amino acid encoded by the mutant codon as compared to the wild-type codon. In some embodiments, the deamination of the mutant A results in a change of the amino acid encoded by the mutant codon. In some embodiments, the deamination of the mutant A results in the codon encoding the wild-type amino acid. In some embodiments, the deamination of the mutant C results in a change of the amino acid encoded by the mutant codon. In some embodiments, the deamination of the mutant C results in the codon encoding the wild-type amino acid. In some embodiments, the subject has or has been diagnosed with a disease or disorder.

[0789] In some embodiments, the adenosine deaminases provided herein are capable of deaminating a deoxyadenosine residue of DNA. Other aspects of the disclosure provide fusion proteins that comprise an adenosine deaminase (e.g., an adenosine deaminase that deaminates deoxyadenosine in DNA as described herein) and a domain (e.g., a Cas9 or a Cpf1 protein) capable of binding to a specific nucleotide sequence. For example, the adenosine can be converted to an inosine residue, which typically base pairs with a cytosine residue. Such fusion proteins are useful inter alia for targeted editing of nucleic acid sequences. Such fusion proteins can be used for targeted editing of DNA in vitro, e.g., for the generation of mutant cells or animals; for the introduction of targeted mutations, e.g., for the correction of genetic defects in cells ex vivo, e.g., in cells obtained from a subject that are subsequently re-introduced into the same or another subject; and for the introduction of targeted mutations in vivo, e.g., the correction of genetic defects or the introduction of deactivating mutations in disease-associated genes in a G to A, or a T to C to mutation can be treated using the nucleobase editors provided herein. The present disclosure provides deaminases, fusion proteins, nucleic acids, vectors, cells, compositions, methods, kits, systems, etc. that utilize the deaminases and nucleobase editors.

### Use of Nucleobase Editors to Target Nucleotides in the G6PC Gene

[0790] The suitability of nucleobase editors that target a nucleotide in the G6PC gene is evaluated as described herein. In one embodiment, a single cell of interest is transfected, transduced, or otherwise modified with a nucleic acid molecule or molecules encoding a nucleobase editor described herein together with a small amount of a vector encoding a reporter (e.g., GFP). These cells can be immortalized human cell lines, such as 293T, K562 or U20S. Alternatively, primary human cells may be used. Cells may also be obtained from a subject or individual, such as from tissue biopsy, surgery, blood, plasma, serum, or other biological fluid. Such cells may be relevant to the eventual cell target,

[0791] Delivery may be performed using a viral vector as further described below. In one embodiment, transfection may be performed using lipid transfection (such as Lipofectamine, Metafectamine, or Fugene) or by electroporation. Following transfection, expression of GFP can be determined either by fluorescence microscopy or by flow cytometry to confirm consistent and high levels of transfection. These preliminary transfections can comprise different nucleobase editors to determine which combinations of editors give the greatest activity.

[0792] The activity of the nucleobase editor is assessed as described herein, i.e., by sequencing the target gene to detect alterations in the target sequence. For Sanger sequencing, purified PCR amplicons are cloned into a plasmid backbone, transformed, miniprepped and sequenced with a single primer. Sequencing may also be performed using next generation sequencing techniques. When using next generation sequencing, amplicons may be 300-500 bp with the intended cut site placed asymmetrically. Following PCR, next generation sequencing adapters and barcodes (for example Illumina multiplex adapters and indexes) may be added to the ends of the amplicon, e.g., for use in high throughput sequencing (for example on an Illumina MiSeq).

[0793] The fusion proteins that induce the greatest levels of target specific alterations in initial tests can be selected for further evaluation.

[0794] In particular embodiments, the nucleobase editors are used to target polynucleotides of interest. In one embodiment, a nucleobase editor of the invention is delivered to cells (e.g., hepatocytes) in conjunction with a guide RNA that is used to target a nucleic acid sequence, e.g., a G6PC polynucleotide harboring GSD1a-associated mutations, thereby altering the target gene, i.e., G6PC.

[0795] In some embodiments, a base editor is targeted by a guide RNA to introduce one or more edits to the sequence of a gene of interest (e.g. G6PC). In some embodiments, the one or more alterations are introduced into the glucose-6-phosphatase (G6PC) gene. In some embodiments the one or more alterations is R83C. In some embodiments, the one or more alterations is Q347X. In some embodiments, the alteration is introduced into a representative Homo sapiens G6PC protein, found under NCBI Reference Sequence No. AAA16222.1 as provided below:

| | |
|---|---|
| 1 | MEEGMNVLHD FGIQSTHYLQ VNYQDSQDWF ILVSVIADLR |
| | NAFYVLFPIW FHLQEAVGIK |
| 61 | LLWVAVIGDW LNLVFKWILF GQRPYWWVLD TDYYSNTSVP |
| | LIKQFPVTCE TGPGSPSGHA |
| 121 | MGTAGVYYVM VISTLSIFQG KIKPTYRFRC LNVILWLGFW |
| | AVQLNVCLSR IYLAAHFPHQ |
| 181 | VVAGVLSGIA VTETFSHIHS IYNASLKKYF LITFFLFSFA |
| | IGFYLLLKGL GVDLLWTLEK |
| 241 | AQRWCEQPEW VHIDTTPFAS LLKNLGTLFG LGLALNSSMY |
| | RESCKGKLSK WLPFRLSSIV |
| 301 | ASLVLLHVFD SLKPPSQVEL VFYVLSFCKS AVVPLASVSV |
| | IPYCLAQVLG QPHKKSL |

[0796] In some embodiments, the alteration is introduced into a representative Homo sapiens G6PC nucleic acid sequence, found under GenBank Reference Sequence No. U01120.1 as provided below:

| | |
|---|---|
| 1 | tagcagagca atcaccacca agcctggaat aactgcaagg |
| | gctctgctga catcttcctg |
| 61 | aggtgccaag gaaatgagga tggaggaagg aatgaatgtt |
| | ctccatgact ttgggatcca |
| 121 | gtcaacacat tacctccagg tgaattacca agactcccag |
| | gactggttca tcttggtgtc |
| 181 | cgtgatcgca gacctcagga atgccttcta cgtcctcttc |
| | cccatctggt tccatcttca |
| 241 | ggaagctgtg ggcattaaac tcctttgggt agctgtgatt |
| | ggagactggc tcaacctcgt |
| 301 | ctttaagtgg attctctttg gacagcgtcc atactggtgg |
| | gttttggata ctgactacta |
| 361 | cagcaacact tccgtgcccc tgataaagca gttccctgta |
| | acctgtgaga ctggaccagg |
| 421 | gagcccctct ggccatgcca tgggcacagc aggtgtatac |
| | tacgtgatgg tcacatctac |
| 481 | tctttccatc tttcagggaa agataaagcc gacctacaga |
| | tttcggtgct tgaatgtcat |
| 541 | tttgtggttg ggattctggg ctgtgcagct gaatgtctgt |
| | ctgtcacgaa tctaccttgc |
| 601 | tgctcatttt cctcatcaag ttgttgctgg agtcctgtca |
| | ggcattgctg ttacagaaac |
| 661 | tttcagccac atccacagca tctataatgc cagcctcaag |
| | aaatattttc tcattacctt |
| 721 | cttcctgttc agcttcgcca tcggatttta tctgctgctc |
| | aagggactgg gtgtagacct |
| 781 | cctgtggact ctggagaaag cccagaggtg gtgcgagcag |
| | ccagaatggg tccacattga |
| 841 | caccacaccc tttgccagcc tcctcaagaa cctgggcacg |
| | ctctttggcc tggggctggc |
| 901 | tctcaactcc agcatgtaca gggagagctg caaggggaaa |
| | ctcagcaagt ggctcccatt |
| 961 | ccgcctcagc tctattgtag cctccctcgt cctcctgcac |
| | gtctttgact ccttgaaacc |
| 1021 | cccatcccaa gtcgagctgg tcttctacgt cttgtccttc |
| | tgcaagagtg cggtagtgcc |
| 1081 | cctggcatcc gtcagtgtca tcccctactg cctcgcccag |
| | gtcctgggcc agccgcacaa |
| 1141 | gaagtcgttg taagagatgt ggagtcttcg gtgtttaaag |
| | tcaacaacca tgccagggat |
| 1201 | tgaggaggac tactatttga agcaatgggc actggtattt |
| | ggagcaagtg acatgccatc |
| 1261 | cattctgccg tcgtggaatt aaatcacgga tggcagattg |
| | gagggtcgcc tggcttattc |
| 1321 | ccatgtgtga ctccagcctg ccctcagcac agactctttc |
| | agatggaggt gccatatcac |
| 1381 | gtacaccata tgcaagtttc ccgccaggag gtcctcctct |
| | ctctacttga atactctcac |
| 1441 | aagtagggag ctcactccca ctggaacagc ccattttatc |
| | tttgaatggt cttctgccag |
| 1501 | cccattttga ggccagaggt gctgtcagct caggtggtcc |
| | tcttttacaa tcctaatcat |
| 1561 | attgggtaat gtttttgaaa agctaatgaa gctattgaga |
| | aagacctgtt gctagaagtt |
| 1621 | gggttgttct ggattttccc ctgaagactt acttattctt |
| | ccgtcacata tacaaaagca |
| 1681 | agacttccag gtagggccag ctcacaagcc caggctggag |
| | atcctaactg agaattttct |
| 1741 | acctgtgttc attcttaccg agaaaaggag aaaggagctc |
| | tgaatctgat aggaaaagaa |
| 1801 | ggctgcctaa ggaggagttt ttagtatgtg gcgtatcatg |
| | caagtgctat gccaagccat |
| 1861 | gtctaaatgg ctttaattat atagtaatgc actctcagta |
| | atgggggacc agcttaagta |
| 1921 | taattaatag atggttagtg gggtaattct gcttctagta |
| | ttttttttac tgtgcataca |
| 1981 | tgttcatcgt atttccttgg atttctgaat ggctgcagtg |
| | acccagatat tgcactaggt |
| 2041 | caaaacattc aggtatagct gacatctcct ctatcacatt |
| | acatcatcct ccttataagc |
| 2101 | ccagctctgc tttttccaga ttcttccact ggctccacat |
| | ccaccccact ggatcttcag |
| 2161 | aaggctagag ggcgactctg gtggtgcttt tgtatgtttc |
| | aattaggctc tgaaatcttg |
| 2221 | ggcaaaatga caaggggagg gccaggattc ctctctcagg |
| | tcactccagt gttactttta |
| 2281 | attcctagag ggtaaatatg actcctttct ctatcccaag |
| | ccaaccaaga gcacattctt |
| 2341 | aaaggaaaag tcaacatctt ctctcttttt tttttttttt |
| | gagacagggt ctcactatgt |
| 2401 | tgcccaggct gctcttgaat tcctgggctc aagcagtcct |
| | cccaccctac cacagcgtcc |
| 2461 | cgcgtagctg gcatacaggt gcaagccact atgtccagct |
| | agccaactcc tccttgcctg |
| 2521 | cttttctttt tttttctttt tttgagacgg cgcacctatc |
| | acccaggctg gagtggagtg |
| 2581 | gcacgatctt ggctcactgc aacctcttcc tcctggttca |
| | agcgattctc atgtctcagc |
| 2641 | ctcctcagta gctaggacta ccggcgtgca ccaccatgcc |
| | aggctaattt ttatattttt |
| 2701 | agaattttag aagagatggg atttcatcat gttggccagg |
| | ctggtctcga actcctgacc |
| 2761 | tcaagtgatc cacctgcctt ggcctcccaa ggtgctagga |
| | ttacaggcat gagccaccgc |
| 2821 | accgggccct ccttgcctgt ttttcaatct catctgatat |
| | gcagagtatt tctgccccac |
| 2881 | ccacctaccc cccaaaaaaa gctgaagcct atttatttga |
| | aagtccttgt ttttgctact |
| 2941 | aattatatag tataccatac attatcattc aaaacaacca |
| | tcctgctcat aacatctttg |
| 3001 | aaaagaaaaa tatatatgtg cagtatttta ttaaagcaac |
| | attttattta agaataaagt |
| 3061 | cttgttaatt actatatttt agatgcaatg tgatc |

### Generating an Intended Mutation

[0797] In some embodiments, the purpose of the methods provided herein is to restore the function of a dysfunctional gene via gene editing. In some embodiments, the function of a dysfunctional gene is restored by introducing an intended mutation. In some embodiments, the methods provided herein can be used to disrupt the normal function of a gene product. The nucleobase editing proteins provided herein can be validated for gene editing-based human therapeutics in vitro, e.g., by correcting a disease-associated mutation in human cell culture. It will be understood by the skilled artisan that the nucleobase editing proteins provided herein, e.g., the fusion proteins comprising a polynucleotide programmable nucleotide binding domain (e.g., Cas9) and a nucleobase editing domain (e.g., an adenosine deaminase domain) can be used to correct any single point A to G or C to T mutation. In the first case, deamination of the mutant A to I corrects the mutation, and in the latter case, deamination of the A that is base-paired with the mutant T, followed by a round of replication, corrects the mutation.

[0798] In some embodiments, the present disclosure provides base editors that efficiently generate an intended mutation, such as a point mutation, in a nucleic acid (e.g., a nucleic acid within a genome of a subject) without generating a significant number of unintended mutations, such as unintended point mutations. In some embodiments, an intended mutation is a mutation that is generated by a specific base editor (e.g., adenosine base editor) bound to a guide polynucleotide (e.g., gRNA), specifically designed to generate the intended mutation. In some embodiments, the intended mutation is a mutation associated with a disease or disorder. In some embodiments, the intended mutation is an adenine (A) to guanine (G) point mutation associated with a disease or disorder. In some embodiments, the intended mutation is a cytosine (C) to thymine (T) point mutation associated with a disease or disorder. In some embodiments, the intended mutation is an adenine (A) to guanine (G) point mutation within the coding region or non-coding region of a gene. In some embodiments, the intended mutation is a cytosine (C) to thymine (T) point mutation within the coding region or non-coding region of a gene. In some embodiments, the intended mutation is a point mutation that generates a stop codon, for example, a premature stop codon within the coding region of a gene. In some embodiments, the intended mutation is a mutation that eliminates a stop codon.

[0799] In some embodiments, any of the base editors provided herein are capable of generating a ratio of intended mutations to unintended mutations (e.g., intended point mutations : unintended point mutations) that is greater than 1:1. In some embodiments, any of the base editors provided herein are capable of generating a ratio of intended mutations to unintended mutations (e.g., intended point mutations : unintended point mutations) that is at least 1.5:1, at least 2:1, at least 2.5:1, at least 3:1, at least 3.5:1, at least 4:1, at least 4.5:1, at least 5:1, at least 5.5:1, at least 6:1, at least 6.5:1, at least 7:1, at least 7.5:1, at least 8:1, at least 10:1, at least 12:1, at least 15:1, at least 20:1, at least 25:1, at least 30:1, at least 40:1, at least 50:1, at least 100:1, at least 150:1, at least 200:1, at least 250:1, at least 500:

[0800] 1, or at least 1000:1, or more

[0801] Details of base editor efficiency are described in International PCT Application Nos. PCT/2017/045381 (WO 2018/027078) and PCT/US2016/058344 (WO 2017/070632), each of which is incorporated herein by reference for its entirety. Also see Komor, A. C., et al., “Programmable editing of a target base in genomic DNA without double-stranded DNA cleavage” Nature 533, 420-424 (2016); Gaudelli, N. M., et al., “Programmable base editing of A•T to G•C in genomic DNA without DNA cleavage” Nature 551, 464-471 (2017); and Komor, A. C., et al., “Improved base excision repair inhibition and bacteriophage Mu Gam protein yields C:G-to-T:A base editors with higher efficiency and product purity” Science Advances 3:eaao4774 (2017), the entire contents of which are hereby incorporated by reference.

[0802] In some embodiments, editing of a plurality of nucleobase pairs in one or more genes using the methods provided herein results in formation of at least one intended mutation. In some embodiments, said formation of said at least one intended mutation results in a precise correction of a disease-causing mutation. It should be appreciated that multiplex editing can be accomplished using any method or combination of methods provided herein.

[0803] Precise Correction of Pathogenic Mutations In some embodiments, the intended mutation is a precise correction of a pathogenic mutation or a disease-causing mutation. The pathogenic mutation can be a pathogenic single nucleotide polymorphism (SNP) or be caused by a SNP. For example, the pathogenic mutation can be an amino acid change in a protein encoded by a gene. In another example, the pathogenic mutation can be a pathogenic SNP in a gene. The precise correction can be to revert the pathogenic mutation back to its wild-type state. In some embodiments, the pathogenic mutation is a G→A point mutation associated with a disease or disorder, and wherein the deamination of the mutant A base with an A-to-G base editor (ABE) results in a sequence that is not associated with a disease or disorder. In some embodiments, the pathogenic mutation is a C→T point mutation. The C→T point mutation can be corrected, for example, by targeting an A-to-G base editor (ABE) to the opposite strand and editing the complement A of the pathogenic T nucleobase. A base editor can be targeted to a pathogenic SNP, or to the complement of the pathogenic SNP. The nomenclature of the description of pathogenic or disease-causing mutations and other sequence variations are described in den Dunnen, J. T. and Antonarakis, S. E., “Mutation Nomenclature Extensions and Suggestions to Describe Complex Mutations: A Discussion.” Human Mutation 15:712 (2000), the entire contents of which is hereby incorporated by reference.

[0804] In a particular embodiment, the disease or disorder is Glycogen Storage Disease Type 1 (GSD1 or Von Gierke Disease). In some embodiments, the disease or disorder is GSD1a. In some embodiments, the pathogenic mutation is in the G6PC gene. In some embodiments, the pathogenic mutation is Q347X of the G6PC gene. In some embodiments, the pathogenic mutation is R83C of the G6PC gene.

### Synthetic Library

[0805] Provided herein are fusion protein libraries and method for using same to optimize base editing that allow for alternative preferred base editing windows compared to canonical base editors. In some embodiments, the disclosure provides a protein library for optimized base editing comprising a plurality of fusion proteins, wherein each one of the plurality of fusion proteins comprises a deaminase flanked by a N-terminal fragment and a C-terminal fragment of a Cas9 polypeptide, wherein the N-terminal fragment of each one of the fusion proteins differs from the N-terminal fragments of the rest of the plurality of fusion proteins or wherein the C-terminal fragment of each one of the fusion proteins differs from the C-terminal fragments of the rest of the plurality of fusion proteins, wherein the deaminase of each one of the fusion proteins deaminates a target nucleobase in proximity to a Protospacer Adjacent Motif (PAM) sequence in a target polynucleotide sequence, and wherein the N terminal fragment or the C terminal fragment binds the target polynucleotide sequence. In some embodiments, for each nucleobase within a CRISPR R-loop, at least one of the plurality of fusion proteins deaminates the nucleobase. In some embodiments, for each nucleobase within of a target polynucleotide from 1 to 20 base pairs away of a PAM sequence, at least one of the plurality of fusion proteins deaminates the nucleobase. In some embodiments, provided herein is a kit comprising the fusion protein library that allows for optimized base editing.

[0806] In some embodiments, a synthetic library of adenosine deaminases alleles, e.g., TadA alleles can be utilized to generate an adenosine base editor with modified base editing efficiency and/or specificity. In some embodiments, an adenosine base editor generated from a synthetic library comprises higher base editing efficiency and/or specificity. In some embodiments, an adenosine base editor generated from a synthetic library exhibits increased base editing efficiency, increased base editing specificity, reduced off-target editing, reduced bystander editing, reduced indel formation, and/or reduced spurious editing compared to an adenosine base editor with a wild type TadA. In some embodiments, an adenosine base editor generated from a synthetic library exhibits increased base editing efficiency, increased base editing specificity, reduced off-target editing, reduced bystander editing, reduced indel formation, and/or reduced spurious editing compared to an adenosine base editor with a TadA*7.10. In some embodiments, the synthetic library comprises randomized TadA portion of ABE. In some embodiments, the synthetic library comprises all 20 canonical amino acid substitutions at each position of TadA. In some embodiments, the synthetic library comprises an average frequency of 1-2 nucleotide substitution mutations per library member. In some embodiments, the synthetic library comprises background mutations found in TadA*7.10.

### Delivery System

[0807] Nucleic Acid-Based Delivery of a Nucleobase Editors and gRNAs

[0808] Nucleic acids encoding base editing systems according to the present disclosure can be administered to subjects or delivered into cells in vitro or in vivo by art-known methods or as described herein. In one embodiment, nucleobase editors can be delivered by, e.g., vectors (e.g., viral or non-viral vectors), non-vector based methods (e.g., using naked DNA, DNA complexes, lipid nanoparticles), or a combination thereof.

[0809] Nucleic acids encoding nucleobase editors can be delivered directly to cells (e.g., hematopoietic cells or their progenitors, hematopoietic stem cells, and/or induced pluripotent stem cells) as naked DNA or RNA, for instance by means of transfection or electroporation, or can be conjugated to molecules (e.g., N-acetylgalactosamine) promoting uptake by the target cells. Nucleic acid vectors, such as the vectors described herein can also be used.

[0810] Nucleic acid vectors can comprise one or more sequences encoding a domain of a fusion protein described herein. A vector can also comprise a sequence encoding a signal peptide (e.g., for nuclear localization, nucleolar localization, or mitochondrial localization), associated with (e.g., inserted into or fused to) a sequence coding for a protein. As one example, a nucleic acid vectors can include a Cas9 coding sequence that includes one or more nuclear localization sequences (e.g., a nuclear localization sequence from SV40), and an adenosine deaminase variant (e.g., ABE8).

[0811] The nucleic acid vector can also include any suitable number of regulatory/control elements, e.g., promoters, enhancers, introns, polyadenylation signals, Kozak consensus sequences, or internal ribosome entry sites (IRES). These elements are well known in the art. For hematopoietic cells suitable promoters can include IFNbeta or CD45.

[0812] Nucleic acid vectors according to this disclosure include recombinant viral vectors. Exemplary viral vectors are set forth herein. Other viral vectors known in the art can also be used. In addition, viral particles can be used to deliver base editing system components in nucleic acid and/or peptide form. For example, “empty” viral particles can be assembled to contain any suitable cargo. Viral vectors and viral particles can also be engineered to incorporate targeting ligands to alter target tissue specificity.

[0813] In addition to viral vectors, non-viral vectors can be used to deliver nucleic acids encoding genome editing systems according to the present disclosure. One important category of non-viral nucleic acid vectors are nanoparticles, which can be organic or inorganic. Nanoparticles are well known in the art. Any suitable nanoparticle design can be used to deliver genome editing system components or nucleic acids encoding such components. For instance, organic (e.g. lipid and/or polymer) nanoparticles can be suitable for use as delivery vehicles in certain embodiments of this disclosure. Exemplary lipids for use in nanoparticle formulations, and/or gene transfer are shown in Table 11 (below).

TABLE 11
Lipids Used for Gene Transfer

| Lipid | Abbreviation | Feature |
|---|---|---|
| 1,2-Dioleoyl-sn-glycero-3-phosphatidylcholine | DOPC | Helper |
| 1,2-Dioleoyl-sn-glycero-3-phosphatidylethanolamine | DOPE | Helper |
| Cholesterol | | Helper |
| N-[1-(2,3-Dioleyloxy)prophyl]N,N,N-trimethylammonium | DOTMA | Cationic |
| chloride | | |
| 1,2-Dioleoyloxy-3-trimethylammonium-propane | DOTAP | Cationic |
| Dioctadecylamidoglycylspermine | DOGS | Cationic |
| N-(3-Aminopropyl)-N,N-dimethyl-2,3-bis(dodecyloxy)-1- | GAP-DLRIE | Cationic |
| propanaminium bromide | | |
| Cetyltrimethylammonium bromide | CTAB | Cationic |
| 6-Lauroxyhexyl ornithinate | LHON | Cationic |
| 1-(2,3-Dioleoyloxypropyl)-2,4,6-trimethylpyridinium | 2Oc | Cationic |
| 2,3-Dioleyloxy-N-[2(sperminecarboxamido-ethyl]-N,N- | DOSPA | Cationic |
| dimethyl-1-propanaminium trifluoroacetate | | |
| 1,2-Dioleyl-3-trimethylammonium-propane | DOPA | Cationic |
| N-(2-Hydroxyethyl)-N,N-dimethyl-2,3-bis(tetradecyloxy)-1- | MDRIE | Cationic |
| propanaminium bromide | | |
| Dimyristooxypropyl dimethyl hydroxyethyl ammonium bromide | DMRI | Cationic |
| 3β-[N-(N′,N′-Dimethylaminoethane)-carbamoyl]cholesterol | DC-Chol | Cationic |
| Bis-guanidium-tren-cholesterol | BGTC | Cationic |
| 1,3-Diodeoxy-2-(6-carboxy-spermyl)-propylamide | DOSPER | Cationic |
| Dimethyloctadecylammonium bromide | DDAB | Cationic |
| Dioctadecylamidoglicylspermidin | DSL | Cationic |
| rac-[(2,3-Dioctadecyloxypropyl)(2-hydroxyethyl)]- | CLIP-1 | Cationic |
| dimethylammonium chloride | | |
| rac-[2(2,3-Dihexadecyloxypropyl- | CLIP-6 | Cationic |
| oxymethyloxy)ethyl]trimethylammonium bromide | | |
| Ethyldimyristoylphosphatidylcholine | EDMPC | Cationic |
| 1,2-Distearyloxy-N,N-dimethyl-3-aminopropane | DSDMA | Cationic |
| 1,2-Dimyristoyl-trimethylammonium propane | DMTAP | Cationic |
| O,O′-Dimyristyl-N-lysyl aspartate | DMKE | Cationic |
| 1,2-Distearoyl-sn-glycero-3-ethylpho sphocholine | DSEPC | Cationic |
| N-Palmitoyl D-erythro-sphingosyl carbamoyl-spermine | CCS | Cationic |
| N-t-Butyl-N0-tetradecyl-3-tetradecylaminopropionamidine | diC14-amidine | Cationic |
| Octadecenolyoxy[ethyl-2-heptadecenyl-3 hydroxyethyl] | DOTIM | Cationic |
| imidazolinium chloride | | |
| N1-Cholesteryloxycarbonyl-3,7-diazanonane-1,9-diamine | CDAN | Cationic |
| 2-(3-[Bis(3-amino-propyl)-amino]propylamino)-N- | RPR209120 | Cationic |
| ditetradecylcarbamoylme-ethyl-acetamide | | |
| 1,2-dilinoleyloxy-3-dimethylaminopropane | DLinDMA | Cationic |
| 2,2-dilinoleyl-4-dimethylaminoethyl-[1,3]-dioxolane | DLin-KC2- | Cationic |
| | DMA | |
| dilinoleyl-methyl-4-dimethylaminobutyrate | DLin-MC3- | Cationic |
| | DMA | |

[0814] Table 12 lists exemplary polymers for use in gene transfer and/or nanoparticle formulations.

TABLE 12
Polymers Used for Gene Transfer

| Polymer | Abbreviation |
|---|---|
| Poly(ethylene)glycol | PEG |
| Polyethylenimine | PEI |
| Dithiobis (succinimidylpropionate) | DSP |
| Dimethyl-3,3′-dithiobispropionimidate | DTBP |
| Poly(ethylene imine)biscarbamate | PEIC |
| Poly(L-lysine) | PLL |
| Histidine modified PLL | |
| Poly(N-vinylpyrrolidone) | PVP |
| Poly(propylenimine) | PPI |
| Poly(amidoamine) | PAMAM |
| Poly(amidoethylenimine) | SS-PAEI |
| Triethylenetetramine | TETA |
| Poly(β-aminoester) | |
| Poly(4-hydroxy-L-proline ester) | PHP |
| Poly(allylamine) | |
| Poly(α-[4-aminobutyl]-L-glycolic acid) | PAGA |
| Poly(D,L-lactic-co-glycolic acid) | PLGA |
| Poly(N-ethyl-4-vinylpyridinium bromide) | |
| Poly(phosphazene)s | PPZ |
| Poly(phosphoester)s | PPE |
| Poly(phosphoramidate)s | PPA |
| Poly(N-2-hydroxypropylmethacrylamide) | pHPMA |
| Poly (2-(dimethylamino)ethyl methacrylate) | pDMAEMA |
| Poly(2-aminoethyl propylene phosphate) | PPE-EA |
| Chitosan | |
| Galactosylated chitosan | |
| N-Dodacylated chitosan | |
| Hi stone | |
| Collagen | |
| Dextran-spermine | D-SPM |

[0815] Table 13 summarizes delivery methods for a polynucleotide encoding a fusion protein described herein.

TABLE 13

| | | Delivery into | | | Type of |
|---|---|---|---|---|---|
| | | Non-Dividing | Duration of | Genome | Molecule |
| Delivery | Vector/Mode | Cells | Expression | Integration | Delivered |
| Physical | (e.g., | YES | Transient | NO | Nucleic Acids |
| | electroporation, | | | | and Proteins |
| | particle gun, | | | | |
| | Calcium | | | | |
| | Phosphate | | | | |
| | transfection | | | | |
| Viral | Retrovirus | NO | Stable | YES | RNA |
| | Lentivirus | YES | Stable | YES/NO with | RNA |
| | | | | modification | |
| | Adenovirus | YES | Transient | NO | DNA |
| | Adeno- | YES | Stable | NO | DNA |
| | Associated | | | | |
| | Virus (AAV) | | | | |
| | Vaccinia Virus | YES | Very | NO | DNA |
| | | | Transient | | |
| | Herpes Simplex | YES | Stable | NO | DNA |
| | Virus | | | | |
| Non-Viral | Cationic | YES | Transient | Depends on | Nucleic Acids |
| | Liposomes | | | what is | and Proteins |
| | | | | delivered | |
| | Polymeric | YES | Transient | Depends on | Nucleic Acids |
| | Nanoparticles | | | what is | and Proteins |
| | | | | delivered | |
| Biological | Attenuated | YES | Transient | NO | Nucleic Acids |
| Non-Viral | Bacteria | | | | |
| Delivery | Engineered | YES | Transient | NO | Nucleic Acids |
| Vehicles | Bacteriophages | | | | |
| | Mammalian | YES | Transient | NO | Nucleic Acids |
| | Virus-like | | | | |
| | Particles | | | | |
| | Biological | YES | Transient | NO | Nucleic Acids |
| | liposomes: | | | | |
| | Erythrocyte | | | | |
| | Ghosts and | | | | |
| | Exosomes | | | | |

[0816] In another aspect, the delivery of genome editing system components or nucleic acids encoding such components, for example, a nucleic acid binding protein such as, for example, Cas9 or variants thereof, and a gRNA targeting a genomic nucleic acid sequence of interest, may be accomplished by delivering a ribonucleoprotein (RNP) to cells. The RNP comprises the nucleic acid binding protein, e.g., Cas9, in complex with the targeting gRNA. RNPs may be delivered to cells using known methods, such as electroporation, nucleofection, or cationic lipid-mediated methods, for example, as reported by Zuris, J. A. et al., 2015, Nat. Biotechnology, 33(1):73-80. RNPs are advantageous for use in CRISPR base editing systems, particularly for cells that are difficult to transfect, such as primary cells. In addition,

[0817] RNPs can also alleviate difficulties that may occur with protein expression in cells, especially when eukaryotic promoters, e.g., CMV or EF1A, which may be used in CRISPR plasmids, are not well-expressed. Advantageously, the use of RNPs does not require the delivery of foreign DNA into cells. Moreover, because an RNP comprising a nucleic acid binding protein and gRNA complex is degraded over time, the use of RNPs has the potential to limit off-target effects. In a manner similar to that for plasmid based techniques, RNPs can be used to deliver binding protein (e.g., Cas9 variants) and to direct homology directed repair (HDR).

[0818] A promoter used to drive base editor coding nucleic acid molecule expression can include AAV ITR. This can be advantageous for eliminating the need for an additional promoter element, which can take up space in the vector. The additional space freed up can be used to drive the expression of additional elements, such as a guide nucleic acid or a selectable marker. ITR activity is relatively weak, so it can be used to reduce potential toxicity due to over expression of the chosen nuclease.

[0819] Any suitable promoter can be used to drive expression of the base editor and, where appropriate, the guide nucleic acid. For ubiquitous expression, promoters that can be used include CMV, CAG, CBh, PGK, SV40, Ferritin heavy or light chains, etc. For brain or other CNS cell expression, suitable promoters can include: Synapsinl for all neurons, CaMKIIalpha for excitatory neurons, GAD67 or GAD65 or VGAT for GABAergic neurons, etc. For liver cell expression, suitable promoters include the Albumin promoter. For lung cell expression, suitable promoters can include SP-B. For endothelial cells, suitable promoters can include ICAM. For hematopoietic cells suitable promoters can include IFNbeta or CD45. For Osteoblasts suitable promoters can include OG-2.

[0820] In some embodiments, a base editor of the present disclosure is of small enough size to allow separate promoters to drive expression of the base editor and a compatible guide nucleic acid within the same nucleic acid molecule. For instance, a vector or viral vector can comprise a first promoter operably linked to a nucleic acid encoding the base editor and a second promoter operably linked to the guide nucleic acid.

[0821] The promoter used to drive expression of a guide nucleic acid can include: Pol III promoters such as U6 or H1 Use of Pol II promoter and intronic cassettes to express gRNA Adeno Associated Virus (AAV).

### Viral Vectors

[0822] A base editor described herein can therefore be delivered with viral vectors. In some embodiments, a base editor disclosed herein can be encoded on a nucleic acid that is contained in a viral vector. In some embodiments, one or more components of the base editor system can be encoded on one or more viral vectors. For example, a base editor and guide nucleic acid can be encoded on a single viral vector. In other embodiments, the base editor and guide nucleic acid are encoded on different viral vectors. In either case, the base editor and guide nucleic acid can each be operably linked to a promoter and terminator. The combination of components encoded on a viral vector can be determined by the cargo size constraints of the chosen viral vector.

[0823] The use of RNA or DNA viral based systems for the delivery of a base editor takes advantage of highly evolved processes for targeting a virus to specific cells in culture or in the host and trafficking the viral payload to the nucleus or host cell genome. Viral vectors can be administered directly to cells in culture, patients (in vivo), or they can be used to treat cells in vitro, and the modified cells can optionally be administered to patients (ex vivo). Conventional viral based systems could include retroviral, lentivirus, adenoviral, adeno-associated and herpes simplex virus vectors for gene transfer. Integration in the host genome is possible with the retrovirus, lentivirus, and adeno-associated virus gene transfer methods, often resulting in long term expression of the inserted transgene. Additionally, high transduction efficiencies have been observed in many different cell types and target tissues.

[0824] Viral vectors can include lentivirus (e.g., HIV and FIV-based vectors), Adenovirus (e.g., AD100), Retrovirus (e.g., Maloney murine leukemia virus, MML-V), herpesvirus vectors (e.g., HSV-2), and Adeno-associated viruses (AAVs), or other plasmid or viral vector types, in particular, using formulations and doses from, for example, U.S. Pat. No. 8,454,972 (formulations, doses for adenovirus), U.S. Pat. No. 8,404,658 (formulations, doses for AAV) and U.S. Pat. No. 5,846,946 (formulations, doses for DNA plasmids) and from clinical trials and publications regarding the clinical trials involving lentivirus, AAV and adenovirus. For example, for AAV, the route of administration, formulation and dose can be as in U.S. Pat. No. 8,454,972 and as in clinical trials involving AAV. For Adenovirus, the route of administration, formulation and dose can be as in U.S. Pat. No. 8,404,658 and as in clinical trials involving adenovirus. For plasmid delivery, the route of administration, formulation and dose can be as in U.S. Pat. No. 5,846,946 and as in clinical studies involving plasmids. Doses can be based on or extrapolated to an average 70 kg individual (e.g. a male adult human), and can be adjusted for patients, subjects, mammals of different weight and species. Frequency of administration is within the ambit of the medical or veterinary practitioner (e.g., physician, veterinarian), depending on usual factors including the age, sex, general health, other conditions of the patient or subject and the particular condition or symptoms being addressed. The viral vectors can be injected into the tissue of interest. For cell-type specific base editing, the expression of the base editor and optional guide nucleic acid can be driven by a cell-type specific promoter.

[0825] The tropism of a retrovirus can be altered by incorporating foreign envelope proteins, expanding the potential target population of target cells. Lentiviral vectors are retroviral vectors that are able to transduce or infect non-dividing cells and typically produce high viral titers. Selection of a retroviral gene transfer system would therefore depend on the target tissue. Retroviral vectors are comprised of cis-acting long terminal repeats with packaging capacity for up to 6-10 kb of foreign sequence. The minimum cis-acting LTRs are sufficient for replication and packaging of the vectors, which are then used to integrate the therapeutic gene into the target cell to provide permanent transgene expression. Widely used retroviral vectors include those based upon murine leukemia virus (MuLV), gibbon ape leukemia virus (GaLV), Simian Immuno deficiency virus (SIV), human immuno deficiency virus (HIV), and combinations thereof (See, e.g., Buchscher et al., J. Virol. 66:2731-2739 (1992); Johann et al., J. Virol. 66:1635-1640 (1992); Sommnerfelt et al., Virol. 176:58-59 (1990); Wilson et al., J. Virol. 63:2374-2378 (1989); Miller et al., J. Virol. 65:2220-2224 (1991); PCT/US94/05700).

[0826] Retroviral vectors, especially lentiviral vectors, can require polynucleotide sequences smaller than a given length for efficient integration into a target cell. For example, retroviral vectors of length greater than 9 kb can result in low viral titers compared with those of smaller size. In some aspects, a base editor of the present disclosure is of sufficient size so as to enable efficient packaging and delivery into a target cell via a retroviral vector. In some embodiments, a base editor is of a size so as to allow efficient packing and delivery even when expressed together with a guide nucleic acid and/or other components of a targetable nuclease system.

[0827] In applications where transient expression is preferred, adenoviral based systems can be used. Adenoviral based vectors are capable of very high transduction efficiency in many cell types and do not require cell division. With such vectors, high titer and levels of expression have been obtained. This vector can be produced in large quantities in a relatively simple system. Adeno-associated virus (“AAV”) vectors can also be used to transduce cells with target nucleic acids, e.g., in the in vitro production of nucleic acids and peptides, and for in vivo and ex vivo gene therapy procedures (See, e.g., West et al., Virology 160:38-47 (1987); U.S. Pat. No. 4,797,368; WO 93/24641; Kotin, Human Gene Therapy 5:793-801 (1994); Muzyczka, J. Clin. Invest. 94:1351 (1994). The construction of recombinant AAV vectors is described in a number of publications, including U.S. Pat. No. 5,173,414; Tratschin et al., Mol. Cell. Biol. 5:3251-3260 (1985); Tratschin, et al., Mol. Cell. Biol. 4:2072-2081 (1984); Hermonat & Muzyczka, PNAS 81:6466-6470 (1984); and Samulski et al., J. Virol. 63:03822-3828 (1989).

[0828] AAV is a small, single-stranded DNA dependent virus belonging to the parvovirus family. The 4.7 kb wild-type (wt) AAV genome is made up of two genes that encode four replication proteins and three capsid proteins, respectively, and is flanked on either side by 145-bp inverted terminal repeats (ITRs). The virion is composed of three capsid proteins, Vp1, Vp2, and Vp3, produced in a 1:1:10 ratio from the same open reading frame but from differential splicing (Vp1) and alternative translational start sites (Vp2 and Vp3, respectively). Vp3 is the most abundant subunit in the virion and participates in receptor recognition at the cell surface defining the tropism of the virus. A phospholipase domain, which functions in viral infectivity, has been identified in the unique N terminus of Vp1.

[0829] Similar to wt AAV, recombinant AAV (rAAV) utilizes the cis-acting 145-bp ITRs to flank vector transgene cassettes, providing up to 4.5 kb for packaging of foreign DNA. Subsequent to infection, rAAV can express a fusion protein of the invention and persist without integration into the host genome by existing episomally in circular head-to-tail concatemers. Although there are numerous examples of rAAV success using this system, in vitro and in vivo, the limited packaging capacity has limited the use of AAV-mediated gene delivery when the length of the coding sequence of the gene is equal or greater in size than the wt AAV genome.

[0830] Viral vectors can be selected based on the application. For example, for in vivo gene delivery, AAV can be advantageous over other viral vectors. In some embodiments, AAV allows low toxicity, which can be due to the purification method not requiring ultra-centrifugation of cell particles that can activate the immune response. In some embodiments, AAV allows low probability of causing insertional mutagenesis because it does not integrate into the host genome. Adenoviruses are commonly used as vaccines because of the strong immunogenic response they induce. Packaging capacity of the viral vectors can limit the size of the base editor that can be packaged into the vector.

[0831] AAV has a packaging capacity of about 4.5 Kb or 4.75 Kb including two 145 base inverted terminal repeats (ITRs). This means disclosed base editor as well as a promoter and transcription terminator can fit into a single viral vector. Constructs larger than 4.5 or 4.75

[0832] Kb can lead to significantly reduced virus production. For example, SpCas9 is quite large, the gene itself is over 4.1 Kb, which makes it difficult for packing into AAV. Therefore, embodiments of the present disclosure include utilizing a disclosed base editor which is shorter in length than conventional base editors. In some examples, the base editors are less than 4 kb. Disclosed base editors can be less than 4.5 kb, 4.4 kb, 4.3 kb, 4.2 kb, 4.1 kb, 4 kb, 3.9 kb, 3.8 kb, 3.7 kb, 3.6 kb, 3.5 kb, 3.4 kb, 3.3 kb, 3.2 kb, 3.1 kb, 3 kb, 2.9 kb, 2.8 kb, 2.7 kb, 2.6 kb, 2.5 kb, 2 kb, or 1.5 kb. In some embodiments, the disclosed base editors are 4.5 kb or less in length.

[0833] An AAV can be AAV1, AAV2, AAVS or any combination thereof. One can select the type of AAV with regard to the cells to be targeted; e.g., one can select AAV serotypes 1, 2, 5 or a hybrid capsid AAV1, AAV2, AAVS or any combination thereof for targeting brain or neuronal cells; and one can select AAV4 for targeting cardiac tissue. AAV8 is useful for delivery to the liver. A tabulation of certain AAV serotypes as to these cells can be found in Grimm, D. et al, J. Virol. 82: 5887-5911 (2008)).

[0834] Lentiviruses are complex retroviruses that have the ability to infect and express their genes in both mitotic and post-mitotic cells. The most commonly known lentivirus is the human immunodeficiency virus (HIV), which uses the envelope glycoproteins of other viruses to target a broad range of cell types.

[0835] Lentiviruses can be prepared as follows. After cloning pCasES10 (which contains a lentiviral transfer plasmid backbone), HEK293FT at low passage (p=5) were seeded in a T-75 flask to 50% confluence the day before transfection in DMEM with 10% fetal bovine serum and without antibiotics. After 20 hours, media is changed to OptiMEM (serum-free) media and transfection was done 4 hours later. Cells are transfected with 10 μg of lentiviral transfer plasmid (pCasES10) and the following packaging plasmids: 5 μg of pMD2.G (VSV-g pseudotype), and 7.5 μg of psPAX2 (gag/pol/rev/tat). Transfection can be done in 4 mL OptiMEM with a cationic lipid delivery agent (50 μl Lipofectamine 2000 and 100 ul Plus reagent). After 6 hours, the media is changed to antibiotic-free DMEM with 10% fetal bovine serum. These methods use serum during cell culture, but serum-free methods are preferred.

[0836] Lentivirus can be purified as follows. Viral supernatants are harvested after 48 hours. Supernatants are first cleared of debris and filtered through a 0.45 p.m low protein binding (PVDF) filter. They are then spun in an ultracentrifuge for 2 hours at 24,000 rpm. Viral pellets are resuspended in 50 μl of DMEM overnight at 4° C. They are then aliquoted and immediately frozen at −80° C.

[0837] In another embodiment, minimal non-primate lentiviral vectors based on the equine infectious anemia virus (EIAV) are also contemplated. In another embodiment, RetinoStat®, an equine infectious anemia virus-based lentiviral gene therapy vector that expresses angiostatic proteins endostatin and angiostatin that is contemplated to be delivered via a subretinal injection. In another embodiment, use of self-inactivating lentiviral vectors are contemplated.

[0838] Any RNA of the systems, for example a guide RNA or a base editor-encoding mRNA, can be delivered in the form of RNA. Base editor-encoding mRNA can be generated using in vitro transcription. For example, nuclease mRNA can be synthesized using a PCR cassette containing the following elements: T7 promoter, optional kozak sequence (GCCACC), nuclease sequence, and 3′ UTR such as a 3′ UTR from beta globin-polyA tail. The cassette can be used for transcription by T7 polymerase. Guide polynucleotides (e.g., gRNA) can also be transcribed using in vitro transcription from a cassette containing a T7 promoter, followed by the sequence “GG”, and guide polynucleotide sequence.

[0839] To enhance expression and reduce possible toxicity, the base editor-coding sequence and/or the guide nucleic acid can be modified to include one or more modified nucleoside e.g. using pseudo-U or 5-Methyl-C.

[0840] The small packaging capacity of AAV vectors makes the delivery of a number of genes that exceed this size and/or the use of large physiological regulatory elements challenging. These challenges can be addressed, for example, by dividing the protein(s) to be delivered into two or more fragments, wherein the N-terminal fragment is fused to a split intein-N and the C-terminal fragment is fused to a split intein-C. These fragments are then packaged into two or more AAV vectors. As used herein, “intein” refers to a self-splicing protein intron (e.g., peptide) that ligates flanking N-terminal and C-terminal exteins (e.g., fragments to be joined). The use of certain inteins for joining heterologous protein fragments is described, for example, in Wood et al., J. Biol. Chem. 289(21); 14512-9 (2014). For example, when fused to separate protein fragments, the inteins IntN and IntC recognize each other, splice themselves out and simultaneously ligate the flanking N- and C-terminal exteins of the protein fragments to which they were fused, thereby reconstituting a full-length protein from the two protein fragments. Other suitable inteins will be apparent to a person of skill in the art.

[0841] A fragment of a fusion protein of the invention can vary in length. In some embodiments, a protein fragment ranges from 2 amino acids to about 1000 amino acids in length. In some embodiments, a protein fragment ranges from about 5 amino acids to about 500 amino acids in length. In some embodiments, a protein fragment ranges from about 20 amino acids to about 200 amino acids in length. In some embodiments, a protein fragment ranges from about 10 amino acids to about 100 amino acids in length. Suitable protein fragments of other lengths will be apparent to a person of skill in the art.

[0842] In one embodiment, dual AAV vectors are generated by splitting a large transgene expression cassette in two separate halves (5′ and 3′ ends, or head and tail), where each half of the cassette is packaged in a single AAV vector (of <5 kb). The re-assembly of the full-length transgene expression cassette is then achieved upon co-infection of the same cell by both dual AAV vectors followed by: (1) homologous recombination (HR) between 5′ and 3′ genomes (dual AAV overlapping vectors); (2) ITR-mediated tail-to-head concatemerization of 5′ and 3′ genomes (dual AAV trans-splicing vectors); or (3) a combination of these two mechanisms (dual AAV hybrid vectors). The use of dual AAV vectors in vivo results in the expression of full-length proteins. The use of the dual AAV vector platform represents an efficient and viable gene transfer strategy for transgenes of >4.7 kb in size.

### Inteins

[0843] In some embodiments, a portion or fragment of a nuclease (e.g., Cas9) is fused to an intein. The nuclease can be fused to the N-terminus or the C-terminus of the intein. In some embodiments, a portion or fragment of a fusion protein is fused to an intein and fused to an AAV capsid protein. The intein, nuclease and capsid protein can be fused together in any arrangement (e.g., nuclease-intein-capsid, intein-nuclease-capsid, capsid-intein-nuclease, etc.). In some embodiments, the N-terminus of an intein is fused to the C-terminus of a fusion protein and the C-terminus of the intein is fused to the N-terminus of an AAV capsid protein.

[0844] Inteins (intervening protein) are auto-processing domains found in a variety of diverse organisms, which carry out a process known as protein splicing. Protein splicing is a multi-step biochemical reaction comprised of both the cleavage and formation of peptide bonds. While the endogenous substrates of protein splicing are proteins found in intein-containing organisms, inteins can also be used to chemically manipulate virtually any polypeptide backbone.

[0845] In protein splicing, the intein excises itself out of a precursor polypeptide by cleaving two peptide bonds, thereby ligating the flanking extein (external protein) sequences via the formation of a new peptide bond. This rearrangement occurs post-translationally (or possibly co-translationally). Intein-mediated protein splicing occurs spontaneously, requiring only the folding of the intein domain.

[0846] About 5% of inteins are split inteins, which are transcribed and translated as two separate polypeptides, the N-intein and C-intein, each fused to one extein. Upon translation, the intein fragments spontaneously and non-covalently assemble into the canonical intein structure to carry out protein splicing in trans. The mechanism of protein splicing entails a series of acyl-transfer reactions that result in the cleavage of two peptide bonds at the intein-extein junctions and the formation of a new peptide bond between the N- and C-exteins. This process is initiated by activation of the peptide bond joining the N-extein and the N-terminus of the intein. Virtually all inteins have a cysteine or serine at their N-terminus that attacks the carbonyl carbon of the C-terminal N-extein residue. This N to O/S acyl-shift is facilitated by a conserved threonine and histidine (referred to as the TXXH motif), along with a commonly found aspartate, which results in the formation of a linear (thio)ester intermediate. Next, this intermediate is subject to trans-(thio)esterification by nucleophilic attack of the first C-extein residue (+1), which is a cysteine, serine, or threonine. The resulting branched (thio)ester intermediate is resolved through a unique transformation: cyclization of the highly conserved C-terminal asparagine of the intein. This process is facilitated by the histidine (found in a highly conserved HNF motif) and the penultimate histidine and may also involve the aspartate. This succinimide formation reaction excises the intein from the reactive complex and leaves behind the exteins attached through a non-peptidic linkage. This structure rapidly rearranges into a stable peptide bond in an intein-independent fashion.

[0847] In some embodiments, an N-terminal fragment of a base editor (e.g., ABE, CBE) is fused to a split intein-N and a C-terminal fragment is fused to a split intein-C. These fragments are then packaged into two or more AAV vectors. The use of certain inteins for joining heterologous protein fragments is described, for example, in Wood et al.,J. Biol. Chem. 289(21); 14512-9 (2014). For example, when fused to separate protein fragments, the inteins IntN and IntC recognize each other, splice themselves out and simultaneously ligate the flanking N- and C-terminal exteins of the protein fragments to which they were fused, thereby reconstituting a full-length protein from the two protein fragments. Other suitable inteins will be apparent to a person of skill in the art.

[0848] In some embodiments, an ABE was split into N- and C-terminal fragments at Ala, Ser, Thr, or Cys residues within selected regions of SpCas9. These regions correspond to loop regions identified by Cas9 crystal structure analysis. The N-terminus of each fragment is fused to an intein-N and the C-terminus of each fragment is fused to an intein C at amino acid positions S303, T310, T313, S355, A456, S460, A463, T466, S469, T472, T474, C574, S577, A589, and S590, which are indicated in Bold Capitals in the sequence below.

| | |
|---|---|
| 1 | mdkkysigld igtnsvgwav itdeykvpsk kfkvlgntdr |
| | hsikknliga llfdsgetae |
| 61 | atrlkrtarr rytrrknric ylqeifsnem akvddsffhr |
| | leesflveed kkherhpifg |
| 121 | nivdevayhe kyptiyhlrk klvdstdkad lrliylalah |
| | mikfrghfli egdlnpdnsd |
| 181 | vdklfiglvg tynqlfeenp inasgvdaka ilsarlsksr |
| | rlenliaqlp gekknglfgn |
| 241 | lialslgltp nfksnfdlae daklqlskdt ydddldnlla |
| | gigdqyadlf laaknlsdai |
| 301 | llSdilrvnT eiTkaplsas mikrydehhq dltllkalvr |
| | qqlpekykei ffdqSkngya |
| 361 | gyidggasqe efykfikpil ekmdgteell vklnredllr |
| | kqrtfdngsi phqihlgelh |
| 421 | ailrrqedfy pflkdnreki ekiltfripy yvgplArgnS |
| | rfAwmTrkSe eTiTpwnfee |
| 481 | vvdkgasaqs fiermtnfdk nlpnekvlpk hsllyeyftv |
| | yneltkvkyv tegmrkpafl |
| 541 | sgeqkkaivd llfktnrkvt vkqlkedyfk kieCfdSvei |
| | sgvedrfnAS lgtyhdllki |
| 601 | ikdkdfldne enedilediv ltltlfedre mieerlktya |
| | hlfddkvmkg lkrrrytgwg |
| 661 | rlsrklingi rdkqsgktil dflksdgfan rnfmqlihdd |
| | sltfkediqk aqvsgqgdsl |
| 721 | hehianlags paikkgilqt vkvvdelvkv mgrhkpeniv |
| | iemarenqtt qkgqknsrer |
| 781 | mkrieegike lgsqilkehp ventqlqnek lylyylqngr |
| | dmyvdgeldi nrlsdydvdh |
| 841 | ivpqsflkdd sidnkvltrs dknrgksdnv pseevvkkmk |
| | nywrqllnak litgrkfdnl |
| 901 | tkaergglse ldkagfikrq lvetrqitkh vaqildsrmn |
| | tkydendkli revkvitlks |
| 961 | klvsdfrkdf qfykvreinn yhhandayln avvgtalikk |
| | ypklesefvy gdykvydvrk |
| 1021 | miakseqeig katakyffys nimnffktei tlangeirkr |
| | plietngetg eivwdkgrdf |
| 1081 | atvrkvlsmp qvnivkktev qtggfskesi lpkrnsdkli |
| | arkkdwdpkk yggfdsptva |
| 1141 | ysvlvvakve kgkskklksv kellgitime rssfeknpid |
| | fleakgykev kkdliiklpk |
| 1201 | yslfelengr krmlasagel qkgnelalps kyvnflylas |
| | hyeklkgspe dneqkqlfve |
| 1261 | qhkhyldeii eqisefskry iladanldkv lsaynkhrdk |
| | pireqaenii hlftltnlga |
| 1321 | paafkyfdtt idrkrytstk evldatlihq sitglyetri |
| | dlsqlggd |

### Use of Nucleobase Editors to Target Mutations

[0849] The suitability of nucleobase editors that targets a mutation is evaluated as described herein. In one embodiment, a single cell of interest is transduced with a base editing system together with a small amount of a vector encoding a reporter (e.g., GFP). These cells can be any cell line known in the art, including immortalized human cell lines, such as 293T, K562 or U20S. Alternatively, primary cells (e.g., human) may be used. Such cells may be relevant to the eventual cell target.

[0850] Delivery may be performed using a viral vector. In one embodiment, transfection may be performed using lipid transfection (such as Lipofectamine or Fugene) or by electroporation. Following transfection, expression of GFP can be determined either by fluorescence microscopy or by flow cytometry to confirm consistent and high levels of transfection. These preliminary transfections can comprise different nucleobase editors to determine which combinations of editors give the greatest activity.

[0851] The activity of the nucleobase editor is assessed as described herein, i.e., by sequencing the genome of the cells to detect alterations in a target sequence. For Sanger sequencing, purified PCR amplicons are cloned into a plasmid backbone, transformed, miniprepped and sequenced with a single primer. Sequencing may also be performed using next generation sequencing techniques. When using next generation sequencing, amplicons may be 300-500 bp with the intended cut site placed asymmetrically. Following PCR, next generation sequencing adapters and barcodes (for example Illumina multiplex adapters and indexes) may be added to the ends of the amplicon, e.g., for use in high throughput sequencing (for example on an Illumina MiSeq).

[0852] The fusion proteins that induce the greatest levels of target specific alterations in initial tests can be selected for further evaluation.

[0853] In particular embodiments, the nucleobase editors are used to target polynucleotides of interest. In one embodiment, a nucleobase editor of the invention is delivered to cells (e.g., hematopoietic cells or their progenitors, hematopoietic stem cells, and/or induced pluripotent stem cells) in conjunction with a guide RNA that is used to target a mutation of interest within the genome of a cell, thereby altering the mutation. In some embodiments, a base editor is targeted by a guide RNA to introduce one or more edits to the sequence of a gene of interest.

[0854] The system can comprise one or more different vectors. In an aspect, the base editor is codon optimized for expression the desired cell type, preferentially a eukaryotic cell, preferably a mammalian cell or a human cell.

[0855] In general, codon optimization refers to a process of modifying a nucleic acid sequence for enhanced expression in the host cells of interest by replacing at least one codon (e.g. about or more than about 1, 2, 3, 4, 5, 10, 15, 20, 25, 50, or more codons) of the native sequence with codons that are more frequently or most frequently used in the genes of that host cell while maintaining the native amino acid sequence. Various species exhibit particular bias for certain codons of a particular amino acid. Codon bias (differences in codon usage between organisms) often correlates with the efficiency of translation of messenger RNA (mRNA), which is in turn believed to be dependent on, among other things, the properties of the codons being translated and the availability of particular transfer RNA (tRNA) molecules. The predominance of selected tRNAs in a cell is generally a reflection of the codons used most frequently in peptide synthesis. Accordingly, genes can be tailored for optimal gene expression in a given organism based on codon optimization. Codon usage tables are readily available, for example, at the “Codon Usage Database” available at www.kazusa.orjp/codon/ (visited Jul. 9, 2002), and these tables can be adapted in a number of ways. See, Nakamura, Y., et al. “Codon usage tabulated from the international DNA sequence databases: status for the year 2000” Nucl. Acids Res. 28:292 (2000). Computer algorithms for codon optimizing a particular sequence for expression in a particular host cell are also available, such as Gene Forge (Aptagen; Jacobus, Pa.), are also available. In some embodiments, one or more codons (e.g. 1, 2, 3, 4, 5, 10, 15, 20, 25, 50, or more, or all codons) in a sequence encoding an engineered nuclease correspond to the most frequently used codon for a particular amino acid.

[0856] Packaging cells are typically used to form virus particles that are capable of infecting a host cell. Such cells include 293 cells, which package adenovirus, and psi.2 cells or PA317 cells, which package retrovirus. Viral vectors used in gene therapy are usually generated by producing a cell line that packages a nucleic acid vector into a viral particle. The vectors typically contain the minimal viral sequences required for packaging and subsequent integration into a host, other viral sequences being replaced by an expression cassette for the polynucleotide(s) to be expressed. The missing viral functions are typically supplied in trans by the packaging cell line. For example, AAV vectors used in gene therapy typically only possess ITR sequences from the AAV genome which are required for packaging and integration into the host genome. Viral DNA can be packaged in a cell line, which contains a helper plasmid encoding the other AAV genes, namely rep and cap, but lacking ITR sequences. The cell line can also be infected with adenovirus as a helper. The helper virus can promote replication of the AAV vector and expression of AAV genes from the helper plasmid. The helper plasmid in some cases is not packaged in significant amounts due to a lack of ITR sequences. Contamination with adenovirus can be reduced by, e.g., heat treatment to which adenovirus is more sensitive than AAV.

### Pharmaceutical Compositions

[0857] Other aspects of the present disclosure relate to pharmaceutical compositions comprising any of the base editors, fusion proteins, or the fusion protein-guide polynucleotide complexes described herein. The term “pharmaceutical composition,” as used herein, refers to a composition formulated for pharmaceutical use. In some embodiments, the pharmaceutical composition further comprises a pharmaceutically acceptable carrier. In some embodiments, the pharmaceutical composition comprises additional agents (e.g., for specific delivery, increasing half-life, or other therapeutic compounds).

[0858] As used herein, the term “pharmaceutically-acceptable carrier” means a pharmaceutically-acceptable material, composition or vehicle, such as a liquid or solid filler, diluent, excipient, manufacturing aid (e.g., lubricant, talc magnesium, calcium or zinc stearate, or steric acid), or solvent encapsulating material, involved in carrying or transporting the compound from one site (e.g., the delivery site) of the body, to another site (e.g., organ, tissue or portion of the body). A pharmaceutically acceptable carrier is “acceptable” in the sense of being compatible with the other ingredients of the formulation and not injurious to the tissue of the subject (e.g., physiologically compatible, sterile, physiologic pH, etc.).

[0859] Some nonlimiting examples of materials which can serve as pharmaceutically-acceptable carriers include: (1) sugars, such as lactose, glucose and sucrose; (2) starches, such as corn starch and potato starch; (3) cellulose, and its derivatives, such as sodium carboxymethyl cellulose, methylcellulose, ethyl cellulose, microcrystalline cellulose and cellulose acetate; (4) powdered tragacanth; (5) malt; (6) gelatin; (7) lubricating agents, such as magnesium stearate, sodium lauryl sulfate and talc; (8) excipients, such as cocoa butter and suppository waxes; (9) oils, such as peanut oil, cottonseed oil, safflower oil, sesame oil, olive oil, corn oil and soybean oil; (10) glycols, such as propylene glycol; (11) polyols, such as glycerin, sorbitol, mannitol and polyethylene glycol (PEG); (12) esters, such as ethyl oleate and ethyl laurate; (13) agar; (14) buffering agents, such as magnesium hydroxide and aluminum hydroxide; (15) alginic acid; (16) pyrogen-free water; (17) isotonic saline; (18) Ringer's solution; (19) ethyl alcohol; (20) pH buffered solutions; (21) polyesters, polycarbonates and/or polyanhydrides; (22) bulking agents, such as polypeptides and amino acids (23) serum alcohols, such as ethanol; and (23) other non-toxic compatible substances employed in pharmaceutical formulations. Wetting agents, coloring agents, release agents, coating agents, sweetening agents, flavoring agents, perfuming agents, preservative and antioxidants can also be present in the formulation. The terms such as “excipient,” “carrier,” “pharmaceutically acceptable carrier,” “vehicle” or the like are used interchangeably herein.

[0860] Pharmaceutical compositions can comprise one or more pH buffering compounds to maintain the pH of the formulation at a predetermined level that reflects physiological pH, such as in the range of about 5.0 to about 8.0. The pH buffering compound used in the aqueous liquid formulation can be an amino acid or mixture of amino acids, such as histidine or a mixture of amino acids such as histidine and glycine. In some embodiments, the pH buffering compound is an agent which maintains the pH of the formulation at a predetermined level, such as in the range of about 5.0 to about 8.0, and which does not chelate calcium ions. Illustrative examples of such pH buffering compounds include, but are not limited to, imidazole and acetate ions. The pH buffering compound may be present in any amount suitable to maintain the pH of the formulation at a predetermined level.

[0861] Pharmaceutical compositions can also contain one or more osmotic modulating agents, i.e., a compound that modulates the osmotic properties (e.g., tonicity, osmolality, and/or osmotic pressure) of the formulation to a level that is acceptable to the blood stream and blood cells of recipient individuals. The osmotic modulating agent can be an agent that does not chelate calcium ions. The osmotic modulating agent can be any compound known or available to those skilled in the art that modulates the osmotic properties of the formulation. One skilled in the art may empirically determine the suitability of a given osmotic modulating agent for use in the inventive formulation. Illustrative examples of suitable types of osmotic modulating agents include, but are not limited to: salts, such as sodium chloride and sodium acetate; sugars, such as sucrose, dextrose, and mannitol; amino acids, such as glycine; and mixtures of one or more of these agents and/or types of agents. The osmotic modulating agent(s) may be present in any concentration sufficient to modulate the osmotic properties of the formulation.

[0862] In some embodiments, the pharmaceutical composition is formulated for delivery to a subject, e.g., for gene editing. Suitable routes of administrating the pharmaceutical composition described herein include, without limitation: topical, subcutaneous, suboccipital, transdermal, intradermal, intralesional, intraarticular, intraperitoneal, intravesical, transmucosal, gingival, intradental, intracochlear, transtympanic, intraorgan, epidural, intrathecal, intramuscular, intravenous, intravascular, intraosseus, periocular, intratumoral, intracerebral, and intracerebroventricular administration.

[0863] In some embodiments, the pharmaceutical composition described herein is administered locally to a diseased site (e.g., tumor site). In some embodiments, the pharmaceutical composition described herein is administered to a subject by injection, by means of a catheter, by means of a suppository, or by means of an implant, the implant being of a porous, non-porous, or gelatinous material, including a membrane, such as a sialastic membrane, or a fiber.

[0864] In other embodiments, the pharmaceutical composition described herein is delivered in a controlled release system. In one embodiment, a pump can be used (see, e.g., Langer, 1990, Science 249: 1527-1533; Sefton, 1989, CRC Crit. Ref. Biomed. Eng. 14:201; Buchwald et al., 1980, Surgery 88:507; Saudek et al, 1989, N. Engl. J. Med. 321:574). In another embodiment, polymeric materials can be used. (See, e.g., Medical Applications of Controlled Release (Langer and Wise eds., CRC Press, Boca Raton, Fla., 1974); Controlled Drug Bioavailability, Drug Product Design and Performance (Smolen and Ball eds., Wiley, N.Y., 1984); Ranger and Peppas, 1983, Macromol. Sci. Rev. Macromol. Chem. 23:61. See also Levy et al., 1985, Science 228: 190; During et al., 1989, Ann. Neurol. 25:351; Howard et ah, 1989, J. Neurosurg. 71: 105.) Other controlled release systems are discussed, for example, in Langer, supra.

[0865] In some embodiments, the pharmaceutical composition is formulated in accordance with routine procedures as a composition adapted for intravenous or subcutaneous administration to a subject, e.g., a human. In some embodiments, pharmaceutical composition for administration by injection are solutions in sterile isotonic use as solubilizing agent and a local anesthetic such as lignocaine to ease pain at the site of the injection. Generally, the ingredients are supplied either separately or mixed together in unit dosage form, for example, as a dry lyophilized powder or water free concentrate in a hermetically sealed container such as an ampoule or sachette indicating the quantity of active agent. Where the pharmaceutical is to be administered by infusion, it can be dispensed with an infusion bottle containing sterile pharmaceutical grade water or saline. Where the pharmaceutical composition is administered by injection, an ampoule of sterile water for injection or saline can be provided so that the ingredients can be mixed prior to administration.

[0866] A pharmaceutical composition for systemic administration can be a liquid, e.g., sterile saline, lactated Ringer's or Hank's solution. In addition, the pharmaceutical composition can be in solid forms and re-dissolved or suspended immediately prior to use. Lyophilized forms are also contemplated. The pharmaceutical composition can be contained within a lipid particle or vesicle, such as a liposome or microcrystal, which is also suitable for parenteral administration. The particles can be of any suitable structure, such as unilamellar or plurilamellar, so long as compositions are contained therein. Compounds can be entrapped in “stabilized plasmid-lipid particles” (SPLP) containing the fusogenic lipid dioleoylphosphatidylethanolamine (DOPE), low levels (5-10 mol%) of cationic lipid, and stabilized by a polyethyleneglycol (PEG) coating (Zhang Y. P. et ah, Gene Ther. 1999, 6: 1438-47). Positively charged lipids such as N-[1-(2,3-dioleoyloxi)propyl]-N,N,N-trimethyl-amoniummethylsulfate, or “DOTAP,” are particularly preferred for such particles and vesicles. The preparation of such lipid particles is well known. See, e.g., U.S. Pat. Nos. 4,880,635; 4,906,477; 4,911,928; 4,917,951; 4,920,016; and 4,921,757; each of which is incorporated herein by reference.

[0867] The pharmaceutical composition described herein can be administered or packaged as a unit dose, for example. The term “unit dose” when used in reference to a pharmaceutical composition of the present disclosure refers to physically discrete units suitable as unitary dosage for the subject, each unit containing a predetermined quantity of active material calculated to produce the desired therapeutic effect in association with the required diluent; i.e., carrier, or vehicle.

[0868] Further, the pharmaceutical composition can be provided as a pharmaceutical kit comprising (a) a container containing a compound of the invention in lyophilized form and (b) a second container containing a pharmaceutically acceptable diluent (e.g., sterile used for reconstitution or dilution of the lyophilized compound of the invention. Optionally associated with such container(s) can be a notice in the form prescribed by a governmental agency regulating the manufacture, use or sale of pharmaceuticals or biological products, which notice reflects approval by the agency of manufacture, use or sale for human administration.

[0869] In another aspect, an article of manufacture containing materials useful for the treatment of the diseases described above is included. In some embodiments, the article of manufacture comprises a container and a label. Suitable containers include, for example, bottles, vials, syringes, and test tubes. The containers can be formed from a variety of materials such as glass or plastic. In some embodiments, the container holds a composition that is effective for treating a disease described herein and can have a sterile access port. For example, the container can be an intravenous solution bag or a vial having a stopper pierceable by a hypodermic injection needle. The active agent in the composition is a compound of the invention. In some embodiments, the label on or associated with the container indicates that the composition is used for treating the disease of choice. The article of manufacture can further comprise a second container comprising a pharmaceutically-acceptable buffer, such as phosphate-buffered saline, Ringer's solution, or dextrose solution. It can further include other materials desirable from a commercial and user standpoint, including other buffers, diluents, filters, needles, syringes, and package inserts with instructions for use.

[0870] In some embodiments, any of the fusion proteins, gRNAs, and/or complexes described herein are provided as part of a pharmaceutical composition. In some embodiments, the pharmaceutical composition comprises any of the fusion proteins provided herein. In some embodiments, the pharmaceutical composition comprises any of the complexes provided herein. In some embodiments, the pharmaceutical composition comprises a ribonucleoprotein complex comprising an RNA-guided nuclease (e.g., Cas9) that forms a complex with a gRNA and a cationic lipid. In some embodiments pharmaceutical composition comprises a gRNA, a nucleic acid programmable DNA binding protein, a cationic lipid, and a pharmaceutically acceptable excipient. Pharmaceutical compositions can optionally comprise one or more additional therapeutically active substances.

[0871] In some embodiments, compositions provided herein are administered to a subject, for example, to a human subject, in order to effect a targeted genomic modification within the subject. In some embodiments, cells are obtained from the subject and contacted with any of the pharmaceutical compositions provided herein. In some embodiments, cells removed from a subject and contacted ex vivo with a pharmaceutical composition are re-introduced into the subject, optionally after the desired genomic modification has been effected or detected in the cells. Methods of delivering pharmaceutical compositions comprising nucleases are known, and are described, for example, in U.S. Pat. Nos. 6,453,242; 6,503,717; 6,534,261; 6,599,692; 6,607,882; 6,689,558; 6,824,978; 6,933,113; 6,979,539; 7,013,219; and 7,163,824, the disclosures of all of which are incorporated by reference herein in their entireties. Although the descriptions of pharmaceutical compositions provided herein are principally directed to pharmaceutical compositions which are suitable for administration to humans, it will be understood by the skilled artisan that such compositions are generally suitable for administration to animals or organisms of all sorts, for example, for veterinary use.

[0872] Modification of pharmaceutical compositions suitable for administration to humans in order to render the compositions suitable for administration to various animals is well understood, and the ordinarily skilled veterinary pharmacologist can design and/or perform such modification with merely ordinary, if any, experimentation. Subjects to which administration of the pharmaceutical compositions is contemplated include, but are not limited to, humans and/or other primates; mammals, domesticated animals, pets, and commercially relevant mammals such as cattle, pigs, horses, sheep, cats, dogs, mice, and/or rats; and/or birds, including commercially relevant birds such as chickens, ducks, geese, and/or turkeys.

[0873] Formulations of the pharmaceutical compositions described herein can be prepared by any method known or hereafter developed in the art of pharmacology. In general, such preparatory methods include the step of bringing the active ingredient(s) into association with an excipient and/or one or more other accessory ingredients, and then, if necessary and/or desirable, shaping and/or packaging the product into a desired single- or multi-dose unit. Pharmaceutical formulations can additionally comprise a pharmaceutically acceptable excipient, which, as used herein, includes any and all solvents, dispersion media, diluents, or other liquid vehicles, dispersion or suspension aids, surface active agents, isotonic agents, thickening or emulsifying agents, preservatives, solid binders, lubricants and the like, as suited to the particular dosage form desired. Remington's The Science and Practice of Pharmacy, 21st Edition, A. R. Gennaro (Lippincott, Williams & Wilkins, Baltimore, Md., 2006; incorporated in its entirety herein by reference) discloses various excipients used in formulating pharmaceutical compositions and known techniques for the preparation thereof. See also PCT application PCT/US2010/055131 (Publication number WO2011/053982 A8, filed Nov. 2, 2010), incorporated in its entirety herein by reference, for additional suitable methods, reagents, excipients and solvents for producing pharmaceutical compositions comprising a nuclease.

[0874] Except insofar as any conventional excipient medium is incompatible with a substance or its derivatives, such as by producing any undesirable biological effect or otherwise interacting in a deleterious manner with any other component(s) of the pharmaceutical composition, its use is contemplated to be within the scope of this disclosure.

[0875] The compositions, as described above, can be administered in effective amounts. The effective amount will depend upon the mode of administration, the particular condition being treated, and the desired outcome. It may also depend upon the stage of the condition, the age and physical condition of the subject, the nature of concurrent therapy, if any, and like factors well-known to the medical practitioner. For therapeutic applications, it is that amount sufficient to achieve a medically desirable result.

[0876] In some embodiments, compositions in accordance with the present disclosure can be used for treatment of any of a variety of diseases, disorders, and/or conditions.

### Methods of Treating Glycogen Storage Disease Type 1a (GSD1a)

[0877] Provided also are methods of treating Glycogen Storage Disease Type 1a (GSD1a) and/or the genetic mutations in G6PC that cause GSD1a that comprise administering to a subject (e.g., a mammal, such as a human) a therapeutically effective amount of a pharmaceutical composition that comprises a polynucleotide encoding a base editor system (e.g., Adenosine Deaminase Base Editor 8 (ABE8) and gRNA) described herein. In some embodiments, the base editor is a fusion protein that comprises a polynucleotide programmable DNA binding domain and an adenosine deaminase domain. A cell of the subject is transduced with the base editor and one or more guide polynucleotides that target the base editor to effect an A•T to G•C alteration of a nucleic acid sequence containing mutations in the G6PC gene.

[0878] The methods herein include administering to the subject (including a subject identified as being in need of such treatment, or a subject suspected of being at risk of disease and in need of such treatment) an effective amount of a composition described herein. Identifying a subject in need of such treatment can be in the judgment of a subject or a health care professional and can be subjective (e.g., opinion) or objective (e.g., measurable by a test or diagnostic method).

[0879] The therapeutic methods, in general, comprise administration of a therapeutically effective amount of a pharmaceutical composition comprising, for example, a vector encoding a base editor and a gRNA that targets the G6PC gene of a subject (e.g., a human patient) in need thereof. Such treatment will be suitably administered to a subject, particularly a human subject, suffering from, having, susceptible to, or at risk for GSD1a. The compositions herein may be also used in the treatment of any other disorders in which GSD1a may be implicated.

[0880] In one embodiment, the invention provides a method of monitoring treatment progress is provided. The method includes the step of determining a level of diagnostic marker (Marker) (e.g., SNP associated with GSD1a) or diagnostic measurement (e.g., screen, assay) in a subject suffering from or susceptible to a disorder or symptoms thereof associated with GSD1a in which the subject has been administered a therapeutic amount of a composition herein sufficient to treat the disease or symptoms thereof. The level of Marker determined in the method can be compared to known levels of Marker in either healthy normal controls or in other afflicted patients to establish the subject's disease status. In preferred embodiments, a second level of Marker in the subject is determined at a time point later than the determination of the first level, and the two levels are compared to monitor the course of disease or the efficacy of the therapy. In certain preferred embodiments, a pre-treatment level of Marker in the subject is determined prior to beginning treatment according to this invention; this pre-treatment level of Marker can then be compared to the level of Marker in the subject after the treatment commences, to determine the efficacy of the treatment.

[0881] In some embodiments, cells are obtained from the subject and contacted with a pharmaceutical composition as provided herein. In some embodiments, cells removed from a subject and contacted ex vivo with a pharmaceutical composition are re-introduced into the subject, optionally after the desired genomic modification has been affected or detected in the cells. Methods of delivering pharmaceutical compositions comprising nucleases are described, for example, in U.S. Pat. Nos. 6,453,242; 6,503,717; 6,534,261; 6,599,692; 6,607,882; 6,689,558; 6,824,978; 6,933,113; 6,979,539; 7,013,219; and 7,163,824, the disclosures of all of which are incorporated by reference herein in their entireties. Although the descriptions of pharmaceutical compositions provided herein are principally directed to pharmaceutical compositions which are suitable for administration to humans, it will be understood by the skilled artisan that such compositions are generally suitable for administration to animals or organisms of all sorts, for example, for veterinary use.

### Kits

[0882] Various aspects of this disclosure provide kits comprising a base editor system. In one embodiment, the kit comprises a nucleic acid construct comprising a nucleotide sequence encoding a nucleobase editor fusion protein. The fusion protein comprises a deaminase (e.g., adenine deaminase) and a nucleic acid programmable DNA binding protein (napDNAbp). In some embodiments, the kit comprises at least one guide RNA capable of targeting a nucleic acid molecule of interest, e.g., G6PC GSD1a associated mutations. In some embodiments, the kit comprises a nucleic acid construct comprising a nucleotide sequence encoding at least one guide RNA.

[0883] The kit provides, in some embodiments, instructions for using the kit to edit one or more G6PC GSD1a associated mutations. The instructions will generally include information about the use of the kit for editing nucleic acid molecules. In other embodiments, the instructions include at least one of the following: precautions; warnings; clinical studies; and/or references. The instructions may be printed directly on the container (when present), or as a label applied to the container, or as a separate sheet, pamphlet, card, or folder supplied in or with the container. In a further embodiment, a kit can comprise instructions in the form of a label or separate insert (package insert) for suitable operational parameters. In yet another embodiment, the kit can comprise one or more containers with appropriate positive and negative controls or control samples, to be used as standard(s) for detection, calibration, or normalization. The kit can further comprise a second container comprising a pharmaceutically-acceptable buffer, such as (sterile) phosphate-buffered saline, Ringer's solution, or dextrose solution. It can further include other materials desirable from a commercial and user standpoint, including other buffers, diluents, filters, needles, syringes, and package inserts with instructions for use. In certain embodiments, the kit is useful for the treatment of a subject having Glycogen Storage Disease Type 1a (GSD1a).

[0884] The practice of the present invention employs, unless otherwise indicated, conventional techniques of molecular biology (including recombinant techniques), microbiology, cell biology, biochemistry and immunology, which are well within the purview of the skilled artisan. Such techniques are explained fully in the literature, such as, “Molecular Cloning: A Laboratory Manual”, 4th edition (Sambrook, 2012); “Oligonucleotide Synthesis” (Gait, 1984); “Animal Cell Culture” (Freshney, 1987); “Methods in Enzymology” “Handbook of Experimental Immunology” (Weir, 1996); “Gene Transfer Vectors for Mammalian Cells” (Miller and Calos, 1987); “Current Protocols in Molecular Biology” (Ausubel, 1987); “PCR: The Polymerase Chain Reaction”, (Mullis, 1994); “Current Protocols in Immunology” (Coligan, 1991). These techniques are applicable to the production of the polynucleotides and polypeptides of the invention, and, as such, may be considered in making and practicing the invention. Particularly useful techniques for particular embodiments will be discussed in the sections that follow.

[0885] The following examples are put forth so as to provide those of ordinary skill in the art with a complete disclosure and description of how to make and use the assay, screening, and therapeutic methods of the invention, and are not intended to limit the scope of what the inventors regard as their invention.

### EXAMPLES

[0886] These examples are provided for illustrative purposes only and not to limit the scope of the claims provided herein.

### Example 1. Gene Editing to Correct the Q347X Mutation of Glycogen Storage Disease Type 1A (Von Gierke Disease) in Hek293T Cells

### Example 1.1 Base Editing Strategy for the Correction of the Q347X Mutation

[0887] GSD1a is caused by a mutation in the glucose-6-phosphatase (G6PC) gene, which affects about 80% of patients with GSD1. The Q347X mutation affects about 500 US patients annually diagnosed with GSD1a. This mutation is a single base substitution that introduces a stop codon to prematurely terminate at position 347 (Q347X) of the G6PC protein. A precise correction of Q347X will likely restore expression of G6PC and normalize glucose metabolism.

[0888] Adenosine base editors (ABEs) that employ Cas9 moieties with validated protospacer adjacent motif (PAM) sequence preferences are assessed for their ability to correct the Q347X mutation by efficiently converting A>G at a targeted site. A representative G6PC nucleotide target sequence and corresponding amino acid sequence are shown in FIG. 1. The target site and bystander site “a” nucleobases for correction of the Q347X mutation are indicated. A precise correction at this site would yield the following conversion: TAG>CAG (stop codon>Glutamine).

### Example 1.2 Precise Correction in HEK293T Cells Expressing Q347X

[0889] The Q347X mutation was targeted for reversion to wild-type sequence using A•T to G•C DNA base editors (ABEs) that employ Cas9 moieties with validated protospacer adjacent motif (PAM) sequence preferences. An ABE base editor can be used to target an adenosine (A) nucleobase in the Homo sapiens G6PC nucleic acid sequence to correct the Q347X mutation. An A>G correction at the SNP changes the stop codon at position 347 (Q347X) to glutamine in the G6PC polypeptide.

[0890] To determine which ABE-Cas9 platform is able to most efficiently and precisely correct the targeted Q347X mutation, a G6PC allele bearing the Q347X mutation was genomically integrated in HEK293T cells by lentivirus transduction.

[0891] The G6PC target/insert amino acid sequence indicating on target site and bystander site “a” nucleobases is shown in FIG. 3A. The G6PC gRNA sequence hybridizes to the complement of the G6P1 target sequence shown below:

GACCTAGGCGAGGCAGTAGG GGA

[0892] The NGA PAM sequence (i.e., SpCas9-VRQR) is underlined above.

[0893] The gRNA scaffold seauence is as follows:

GUUUUAGAGCUAGAAAUAGCAAGUUAAAAUAAGGCUAGUCCGUUAUCAAC
UUGAAAAAGUGGCACCGAGUCGGUGCUUUU

[0894] The percentage of precise on target and bystander correction of the GSD1a Q347X mutation was analyzed using ABE8 variants (FIG. 2A and 2B). Variant 2 is a positive control ABE utilizing the adenosine deaminase TadA7.10 VRQR construct. Variant 3 is ABE8.5 utilizing a monomer construct of TadA*8.5 (TadA*7.10+V82S) (IVT MSP471). Variant 4 is ABE8.18 utilizing a heterodimer construct of wild-type TadA with TadA*8.18 (TadA*7.10+V82S) (IVT MSP465).

[0895] Over 80% of on target, precise correction of the Q347 mutation was observed in HEK293T cells (FIG. 2A and 2B). The bystander editing of V348A was non-detectable across the base editor variants. The level of indels across base editor variants was less than 3.5%.

### Example 1.3 Editor Optimization for Correction of GSD1a Q347X Mutation in HEK293T Cells

[0896] To determine optimal ABE base editors for correcting the Q347X mutation in GSD1a, various heterodimer and monomer ABE base editors were electroporated into the HEK293T-Q347X cells.

[0897] A target/spacer sequence for the Q347X mutation is shown in FIG. 3A. The target/spacer sequence shows on target and bystander “a” nucleobases. The Q347X mutation may be targeted using an NGA PAM variant (e.g., GGA).

[0898] Guide RNA (gRNA) 272 was tested targeting the Q347X mutation with ABE8 variants (FIGS. 3-4). The gRNA encompasses the scaffold sequence and the spacer sequence (target sequence) for disease-associated genes as provided herein or as determined based on the knowledge of the skilled practitioner and as would be understood to the skilled practitioner in the art. (See, e.g., Komor, A. C., et al., “Programmable editing of a target base in genomic DNA without double-stranded DNA cleavage” Nature 533, 420-424 (2016); Gaudelli, N. M., et al., “Programmable base editing of A•T to G•C in genomic DNA without DNA cleavage” Nature 551, 464-471 (2017); Komor, A. C., et_al., “Improved base excision repair inhibition and bacteriophage Mu Gam protein yields C:G-to-T:A base editors with higher efficiency and product purity” Science Advances 3:eaao4774 (2017), and Rees, H. A., et al., “Base editing: precision chemistry on the genome and transcriptome of living cells.” Nat Rev Genet. 2018 December; 19(12):770-788. doi: 10.1038/s41576-018-0059-1).

[0899] The gRNA sequence (#272) hybridizes to the complement of the G6PC DNA target sequence shown below:

GACCTAGGCGAGGCAGTAGG GGA

[0900] The NGA PAM sequence (i.e., SpCas9) is underlined above.

[0901] The gRNA scaffold sequence is as follows:

GUUUUAGAGCUAGAAAUAGCAAGUUAAAAUAAGGCUAGUCCGUUAUCAAC
UUGAAAAAGUGGCACCGAGUCGGUGCUUUU

[0902] The percent correction of Q347X using various ABE base editor variants was assessed relative to the positive control ABE7.10 VRQR heterodimer construct (IVT464), positive control monomer construct (IVTmsp468), and negative control GFP (FIG. 3B). Shown in FIG. 3B is a graph depicting the percentage of correction of the GSD1a G6PC Q347X mutation using ABE8 monomer and heterodimer variant constructs. The monomer ABE8 variant constructs include: ABE8.1 utilizing a monomer construct of TadA*8.1 (TadA*7.10+Y147T) (IVT MSP469), ABE8.2 utilizing a monomer construct of TadA*8.2 (TadA*7.10+Y147R) (IVT MSP470), ABE8.3 utilizing a monomer construct of TadA*8.3 (TadA*7.10+Q154S) (IVT MSP473), ABE8.5 utilizing a monomer construct of TadA*8.5 (TadA*7.10+V82S) (IVT MSP471), ABE8.7 utilizing a monomer construct of TadA*8.7 (TadA*7.10+Q154R) (IVT MSP472). The heterodimer ABE8 variant constructs include: ABE8.14 utilizing a heterodimer construct of wild-type TadA with TadA*8.14 (TadA*7.10+Y147T) (IVT MSP463), ABE8.15 utilizing a heterodimer construct of wild-type TadA with TadA*8.15 (TadA*7.10+Y147R) (IVT MSP464), ABE8.16 utilizing a heterodimer construct of wild-type TadA with TadA*8.16 (TadA*7.10+Q154S) (IVT MSP467), ABE8.18 utilizing a heterodimer construct of wild-type TadA with TadA*8.18 (TadA*7.10+V82S) (IVT MSP465), ABE8.20 utilizing a heterodimer construct of wild-type TadA with TadA*8.20 (TadA*7.10+Q154R) (IVT MSP466).

[0903] The percent correction of the Q347X mutation showed >85% editing for a heterodimer variant with a V82S mutation and about 80% editing with a monomer variant with a V82S mutation. Bystander activity was negligible for all variants tested.

### Example 1.4 Double Mutant Editor Optimization for Correction of GSD1a Q347X Mutation in HEK293T Cells

[0904] The percent correction of Q347X using various double mutant ABE8 variants was assessed relative to the positive control ABE7.10 VRQR heterodimer construct (IVT464), positive control monomer construct (IVTmsp468), and negative control GFP (FIG. 4). Shown in FIG. 4 is a graph depicting the percentage of correction of the GSD1a G6PC Q347X mutation using double mutant ABE8 monomer variant constructs comparing on target (A6) to bystander (A2) A>G nucleobases. The monomer ABE8 variant constructs include: ABE8.5 utilizing a monomer construct of TadA*8.5 (TadA*7.10+V82S) (IVT MSP471), ABE8.28 utilizing a monomer construct of TadA*8.28 (TadA*7.10+V82S+Y154S) (IVT MSP501), ABE8.29 utilizing a monomer construct of TadA*8.29 (TadA*7.10+V82S+Y147R) (IVT MSP499), ABE8.30 utilizing a monomer construct of TadA*8.30 (TadA*7.10+V82S+Y154R) (IVT MSP500), ABE8.31 utilizing a monomer construct of TadA*8.31 (TadA*7.10+V82S+H123H) (IVT MSP503), ABE8.32 utilizing a monomer construct of TadA*8.32 (TadA*7.10+V82S+H123H+Y147T) (IVT MSP502).

[0905] The double mutant ABE8 variants performed similarly to that of the single mutant (V82S monomer) ABE8 (ABE8.5) with about 70% to 80% base editing efficiency. Bystander activity was negligible for all variants tested.

### Example 1.5 Editor Optimization for Correction of GSD1a Q347X Mutation in Patient-Derived B-Lymphocytes.

[0906] To determine optimal ABE base editors for correcting the Q347X mutation in GSD1a, heterodimer and monomer ABE base editors were electroporated into patient-derived B-lymphocytes (Coriell Institute) containing the G6PC Q347X mutation.

[0907] Guide RNA (gRNA) 272 was tested targeting the Q347X mutation with ABE8 variants (FIGS. 3-4). The gRNA encompasses the scaffold sequence and the spacer sequence (target sequence) for disease-associated genes as provided herein or as determined based on the knowledge of the skilled practitioner and as would be understood to the skilled practitioner in the art. (See, e.g., Komor, A. C., et al., “Programmable editing of a target base in genomic DNA without double-stranded DNA cleavage” Nature 533, 420-424 (2016); Gaudelli, N. M., et al., “Programmable base editing of A•T to G•C in genomic DNA without DNA cleavage” Nature 551, 464-471 (2017); Komor, A. C., et_al., “Improved base excision repair inhibition and bacteriophage Mu Gam protein yields C:G-to-T:A base editors with higher efficiency and product purity” Science Advances 3:eaao4774 (2017), and Rees, H. A., et al., “Base editing: precision chemistry on the genome and transcriptome of living cells.” Nat Rev Genet. 2018 December; 19(12):770-788. doi: 10.1038/s41576-018-0059-1).

[0908] The gRNA sequence (#272) hybridizes to the complement of the G6PC DNA target sequence shown below:

GACCTAGGCGAGGCAGTAGG GGA

[0909] The NGA PAM sequence (i.e., SpCas9) is underlined above.

[0910] The gRNA scaffold sequence is as follows:

GUUUUAGAGCUAGAAAUAGCAAGUUAAAAUAAGGCUAGUCCGUUAUCAAC
UUGAAAAAGUGGCACCGAGUCGGUGCUUUU

[0911] The percent correction of Q347X using various ABE base editor variants was assessed relative to the positive control ABE7.10 VRQR construct (MSP565) and negative control GFP (FIG. 5). Shown in FIG. 5 is a graph depicting the percentage of A>G correction of the GSD1a G6PC Q347X mutation using ABE8 monomer and heterodimer variant constructs. The constructs include: ABE8.2 utilizing a heterodimer construct of wild-type TadA with TadA*8.2 (TadA*7.10+Y147R) (MSP559), ABE8.18 utilizing a heterodimer construct of wild-type TadA with TadA*8.18 (TadA*7.10+V82S) (MSP560), and ABE8.5 utilizing a monomer construct of TadA*8.5 (TadA*7.10+V82S) (MSP561).

[0912] The percent correction of the Q347X mutation showed about 50%-60% base editing with the ABE8 variants. Bystander activity was negligible for all variants tested.

### Example 1.6 Precise Correction in Heterozygous Patient iPSc-derived Q347X Hepatocytes

[0913] Precise on-target base editing was tested using heterozygous patient iPSc-derived human hepatocytes (Definigen, Hep GSD1a lots 493, 507, and 518). The GSD1a iPSc-derived hepatocytes are compound heterozygous (Q347X/G222R) and harbor the Q347X mutation.

[0914] A target/spacer sequence for the Q347X mutation is shown in FIG. 6A. The target/spacer sequence shows on target and bystander “a” nucleobases. The Q347X mutation may be targeted using an NGA PAM variant (e.g., GGA).

[0915] The gRNA sequence hybridizes to the complement of the G6PC DNA target sequence shown below:

GACCTAGGCGAGGCAGTAGG GGA

[0916] The NGA PAM sequence (i.e., SpCas9) is underlined above.

[0917] The gRNA scaffold sequence is as follows:

GUUUUAGAGCUAGAAAUAGCAAGUUAAAAUAAGGCUAGUCCGUUAUCAA
CUUGAAAAAGUGGCACCGAGUCGGUGCUUUU

[0918] The percent of on-target and bystander A>G base editing correction of Q347X was assessed using ABE 7.10 VRQR in heterozygous (Q347X, G222R) patient iPSc-derived human hepatocytes (FIG. 6B). On-target base editing yielded up to 15% on-target, precise correction of the Q347X mutation. No detectable bystander editing and a very low level of indels was observed.

### Example 1.7 Editor Optimization for Correction of GSD1a Q347X Mutation in Patient iPSc-Derived Hepatocytes

[0919] Base editing was tested using an in vitro transfection method in iPSc-derived human hepatocytes (Definigen, Hep GSD1a lots 493, 507, and 518). The GSD1a iPSc-derived hepatocytes are compound heterozygous (Q347X/G222R) and harbor the Q347X mutation. Manufacturing specific plating and maintenance protocols were used to grow and further drive the differentiation of the cells. Lipofection-based transfection of gRNA and mRNA complexes were carried out at twelve (12) days post cell plating. Cells were lysed and harvested for gDNA 48 hrs post transfection.

[0920] A target/spacer sequence for the Q347X mutation is shown in FIG. 7A. The target/spacer sequence shows on target and bystander “a” nucleobases. The Q347X mutation may be targeted using an NGA PAM variant (e.g., GGA).

[0921] The gRNA sequence hybridizes to the complement of the G6PC DNA target sequence shown below:

GACCTAGGCGAGGCAGTAGG GGA

[0922] The NGA PAM sequence (i.e., SpCas9) is underlined above.

[0923] The gRNA scaffold sequence is as follows:

GUUUUAGAGCUAGAAAUAGCAAGUUAAAAUAAGGCUAGUCCGUUAUCAA
CUUGAAAAAGUGGCACCGAGUCGGUGCUUUU

[0924] The base editing efficiency for on-target A, conversion to G, and indels for correction of the GSD1a Q347X mutation using ABE8 variants in patient iPSc-derived hepatocytes is shown in FIG. 7B. The editing efficiency of the various ABE base editor variants was assessed relative to the positive control TriLink pBxt464 ABE7.10 VRQR construct and untreated negative control (FIG. 7B). The generated base editor variant constructs include: pUtR-TriLink-ABE7.10(Y147R)-VRQR 120A Bbsl; pUtR-TriLink-ABE7.10(V82S)-VRQR 120A Bbsl; pUtR-TriLink-mono-ABE7.10(V82S)-VRQR 120A Bbsl; pUtR-TriLink-VRQR-GeneArt 120A Bbsl; and pUtR-TriLink-Cas9-VRQR-nuclease-bpNLS 120A Bbsl. TriLink constructs were purchased from TriLink Bio Technologies.

Similar editing of G6PC Q347X in patient iPSc-derived hepatocytes was observed with about 10%-12% A>G editing efficiency across optimized base-editor variants in iPSc-derived hepatocytes. The Cas9-VRQR nuclease yielded efficient indels with a similar sequence profile in the target region relative to the untreated control. All base editors yielded low to non-detectable indels and bystander V348A conversion.

### Example 2. In Vitro Transduction of Primary Hepatocyte Co-Cultures System for GSD1A Mutations

### Example 2.1 Co-Cultures System and Transduction Methodology

[0925] Base editing was tested using an in vitro transduction method in a primary hepatocyte co-cultures system. To generate the co-cultures system, primary human hepatocytes (PHH) (BioIVT) were plated at 350k cells per well in a Collagen-Type I coated 24-well plate (Corning, 354408), and incubated at 37° C., 5% CO₂ to generate an adherent cell monolayer. 4 hrs post plating, plated hepatocytes were washed with CP medium (BioIVT) to remove any unadhered cells. 3T3-J2 murine embryonic fibroblasts (Kerafast (distributed from Howard Green (Harvard), Boston) were seeded at a ratio of 95% hepatocyte: 5% fibroblast per well and cultured at 37C, 5% CO₂ for an additional 12 hrs to form co-cultures. Culture medium was replaced every 2 days (5004, per well) for continued maintenance. Shown in FIG. 8B are images of transduced primary hepatocytes from two human hepatocyte donors, RSE and TVR, isolated from two different human livers. They were isolated, cryopreserved, and distributed for sale for research purposes by BioIVT (Maryland, US).

[0926] For performing the transduction, lentivirus was designed to introduce G6PC-R83C or G6PC-Q347X into plasmid vectors, manufactured and purified by VectorBuilder (en.vectorbuilder.com). On the second day post hepatocyte co-culture formation, lentivirus was added at an MOI 500 dropwise into culture medium per well. Co-cultures were transduced for 16 hrs, prior to changing media for fresh CP medium (BioIVT). Culture medium was replaced every 2 days (5004, per well) for continued maintenance. Protein expression occurs over 7 days period in hepatic co-cultures. At day 7 post transduction, co-cultures were transfected using lipofection based reagents co-formulated with gRNA and base-editor mRNA. Cells were lysed and harvested for gDNA 48 hrs post transfection. FIG. 8A provides a timeline of the in vitro transduction schedule in either hepatocyte monolayers or hepatocyte co-cultures showing representative time points.

### Example 2.2 In Vitro Transduction of Primary Hepatocyte Co-Cultures System for GSD1a Q347X Mutation Using Lentivirus

[0927] In vitro transduction was tested. The primary hepatocyte co-cultures were successfully transduced with a lentiviral vector designed with a CMV promoter driving expression of the G6PC Q347X mutation and a 3XFLAG-Tag with a semi-functional titer. Shown in FIG. 9 is the GFP expression (GFP, Brightfield, Merge) on day 6 in primary hepatocyte co-cultured cells transduced with lentiviral vector with TriLink ABE7.10 VRQR (NGA PAM) to correct the GSD1a Q347X mutation at a multiplicity of infection (MOI) of 30, 100, and 300 lentivirus.

### Example 2.3 Optimization of In Vitro Lentiviral Transduced Primary Hepatocyte Co-Cultures System for GSD_la Q347X Mutation

[0928] The editing efficiency in an in vitro lentiviral transduced primary human hepatocyte (PHH) co-culture system was assessed using optimized conditions. The PHH co-culture system from human donor RSE was transduced at day 2 with MOI 500 lentivirus for TBG-G6PC Q347X (FIG. 10A). At day 8, the transduced co-cultures were transfected with TriLink ABE7.10 VRQR, gRNA 272 (NGA PAM).

[0929] The gRNA sequence (#272) hybridizes to the complement of the G6PC DNA target sequence shown below:

GACCTAGGCGAGGCAGTAGG GGA

[0930] The NGA PAM sequence (i.e., SpCas9) is underlined above.

[0931] The on-target editing efficiency of the ABE base editor transfected co-cultures was assessed relative to indels (FIG. 10B). The A>G base editing efficiency of the GSD1a Q347X mutation in transduced primary hepatocyte co-cultures was about 11%-15%. As shown in FIG. 10B, a base editing efficiency greater than 5% was necessary to achieve a therapeutic benefit in animal models.

[0932] In a further experiment, the PHH co-cultures from human donor RSE was transduced at day 2 in media containing 1% DMSO, with or without 4% PEG8000. After transfection, the co-cultures were treated with 0.5mg/ml solution containing collagenase III, collagenase IV, and Hyaluronidase or were kept untreated for 2 minutes in an attempt to breakdown the secreted extracellular matrix (ECM), presumed to be a barrier to entry for transfection reagents.

[0933] The on-target editing efficiency of the ABE base editor transfected co-cultures was assessed relative to indels (FIG. 10C). The A>G base editing efficiency of the GSD1a Q347X mutation at position 6 in transduced primary hepatocyte co-cultures was about 11%-15% across treatment groups. The Q347X correction in the treated PPH co-cultures yielded indels and bystander V348A conversion.

### Example 2.4 Base Editing of G6PC_R83C Mutation in Primary Mouse Hepatocytes Isolated from a Transgenic Mouse Model for GSD1a

[0934] Base editing for the correction of R83C was tested using a primary mouse hepatocyte co-culture system. Primary mouse hepatocytes were isolated from a transgenic mouse model containing the human G6PC R83C (V166L) mutation (FIG. 17A). To determine optimal ABE base editors for correcting the R83C mutation in GSD1a, various saCas9-ABE base editor constructs were transfected into the primary mouse hepatocyte co-culture system as described in Example 2.1.

[0935] A target/spacer nucleic acid sequence for the R83C mutation is shown below. The target/spacer nucleic acid sequence shows on target (bold, italicized and underlined font), synonymous (italicized and underlined) and bystander (italicized) “a” nucleobases. Protospacer bases are bolded, the PAM is bolded and underlined, and bases outside of the protospacer are lowercase. The R83C mutation may be targeted using an NNGRRT PAM variant (e.g., GAGAAT).

ccACCAGTATGGAC [symbol] CTGTCCAAAGAGAAT

[0936] The corresponding amino acid sequence is as follows:
[0937] WWYPCQGFLI

[0938] The gRNA sequence (#820) hybridizes to the complement of the G6PC DNA target sequence shown below:

CCAGTATGGACaCTGTCCAAA GAGAAT

[0939] The NNGRRT PAM sequence (i.e., SaCas9) is underlined above.

[0940] The gRNA scaffold sequence is as follows:

GUUUUAGUACUCUGUAAUGAAAAUUACAGAAUCUACUAAAACAAGGCAA
AAUGCCGUGUUUAUCUCGUCAACUUGUUGGCGAGAUUUU

[0941] The editing efficiency for on target (A12G), synonymous (A10G), bystander (A6G), and indels using various saCas9 nickase-ABE base editor variant constructs were tested for correction of the GSD1a R83C mutation (FIG. 17B). The saCas9 nickase-ABE base editor variant constructs include: pGL79 pUTR-TriLink-ABE8.1 (ABE7.10+Y147T)-saCas9n; pGL80 pUTR-TriLink-ABE8.2 (ABE7.10+Y147R)-saCas9n; pGL82 pUTR-TriLink-ABE8.7 (ABE7.10+Q154R)-saCas9n; pGL83 pUTR-TriLink-ABE8.3 (ABE7.10+Q154S)-saCas9n; pGL92 pUTR-TriLink-ABE7.10-saCas9n; pGL98 pUTR-TriLink-monoTadA-ABE8.12(ABE7.10+Y147T+Q154S)-saCas9n.

[0942] The saCas9 nickase-ABE base editor variant constructs pGL79 pUTR-TriLink-ABE8.1 (ABE7.10+Y147T)-saCas9n and pGL80 pUTR-TriLink-ABE8.2 (ABE7.10+Y147R)-saCas9n achieved the best on target editing efficiency (FIG. 17B).

### Example 3. Gene Editing to Correct the R83C Mutation of Glycogen Storage Disease Type 1A (Von Gierke Disease) in HEK293T Cells

### Example 3.1 Base Editing Strategy for the Correction of the R83C Mutation

[0943] GSD1a is caused by a mutation in the glucose-6-phosphatase (G6PC) gene, which affects about 80% of patients with GSD1. The R83C mutation affects about 900 US patients annually diagnosed with GSD1a. This mutation is a single base substitution that introduces a cysteine at position 83 (R83C) of the G6PC protein. A precise correction of R83C will likely restore expression of G6PC and normalize glucose metabolism.

[0944] Adenosine base editors (ABEs) that employ Cas9 moieties with validated protospacer adjacent motif (PAM) sequence preferences were assessed for their ability to correct the R83C mutation by efficiently converting A>G at a targeted site. A representative G6PC nucleotide target sequence and corresponding amino acid sequence indicating on target and bystander site “a” nucleobases for correction of the R83C mutation are shown in FIG. 11. A precise correction at this site would yield the following conversion: TGT>CGT or TGT>CGC (Cysteine>Arginine).

### Example 3.2 Precise Correction in HEK293T Cells Expressing Q347X

[0945] The R83C mutation was targeted for reversion to wild-type sequence using A•T to G•C DNA base editors (ABEs) that employ Cas9 moieties with validated protospacer adjacent motif (PAM) sequence preferences. An ABE base editor can be used to target an adenosine (A) nucleobase in the Homo sapiens G6PC nucleic acid sequence to correct the R83C mutation. An A>G correction at the SNP changes the cysteine at position 83 (R83C) to arginine in the G6PC polypeptide.

[0946] To determine which ABE-Cas9 platform is able to most efficiently and precisely correct the targeted R83C mutation, a G6PC allele bearing the R83C mutation was genomically integrated in HEK293T cells by lentivirus transduction.

[0947] The G6PC target/insert amino acid sequence indicating on target site, synonymous, and bystander site “a” nucleobases is shown in FIG. 12A. The G6PC gRNA sequence hybridizes to the complement of the G6PC target sequence shown below:

CCAGTTGGACACTGTCCAAA GAGAAT

[0948] The NNGRRT PAM sequence (i.e., SaCas9) is underlined above.

[0949] The gRNA scaffold sequence is as follows:

GUUUUAGUACUCUGUAAUGAAAAUUACAGAAUCUACUAAAACAAGGCAA
AAUGCCGUGUUUAUCUCGUCAACUUGUUGGCGAGAUUUU

[0950] The percentage of correction for on target and bystander correction of the GSD1a Q347X mutation was analyzed using ABE8 variants (FIG. 12B). Empty plasmid was used as a negative control for ABE base editor saABE7.10. Variant 2 is a positive control ABE utilizing a monomer TadA-SaCas9, pGL78 construct. Variant 3 is a base editor utilizing a heterodimer construct of wild-type TadA with TadA*8.18 (TadA*7.10+V82S)−SaCas9, pGL81. Variant 4 is a base editor utilizing a heterodimer construct of wild-type TadA with TadA*8.16 (TadA*7.10+Q154S)−SaCas9, pGL83.

[0951] About 30% of on target, precise correction of the R83C mutation was observed in HEK293T cells (FIG. 12B). About 3% of A>G base editing was observed with Plasmid. Bystander editing was comparable for Variant 1 and Variant 2. Variant 3 demonstrated higher on target correction compared to bystander correction.

### Example 3.3 Base Editing of the G6PC R83C Mutation by Plasmid Transfection in HEK293T Cells

[0952] To determine optimal ABE base editors for correcting the Q347X mutation in GSD1a, various ABE base editors were electroporated into the HEK293T-R83C cells. Guide RNA (gRNA) sequences #820 and #1121, which hybridize to the complement of the G6PC DNA target sequence, are shown in FIG. 13A. The gRNA sequences show on target, synonymous, and bystander “a” nucleobases. The R83C mutation was targeted using either an NNGRRT PAM variant (e.g., gRNA #820 GAGAAT PAM) (i.e., SaCas9) or an NGA PAM variant (e.g. gRNA #1121 AGA PAM) (i.e., SpCas9). gRNAs #820 and #1121 were tested for use in the correction of the GSD 1 a R83C mutation.

[0953] For the gRNA #1121, the scaffold sequence is as follows:

GUUUUAGAGCUAGAAAUAGCAAGUUAAAAUAAGGCUAGUCCGUUAUCAA
CUUGAAAAAGUGGCACCGAGUCGGUGCUUUU

[0954] For the gRNA #820, the scaffold sequence is as follows:

GUUUUAGUACUCUGUAAUGAAAAUUACAGAAUCUACUAAAACAAGGCAA
AAUGCCGUGUUUAUCUCGUCAACUUGUUGGCGAGAUUUU

[0955] The ABE base editor constructs may include either gRNA #820 or #1121, base editor 7.9 or 7.10, and variant VRQR, VRQR CP5, VRQR CP6, or saCas9-ABE (saABE). The ABE base editor constructs shown in FIG. 13B include: ABE7.9 VRQR gRNA #1121; ABE7.10 VRQR gRNA#1121, ABE7.9 VRQR CP5 gRNA#1121, ABE7.10 VRQR CP5 gRNA#1121, ABE7.9 VRQR CP6 gRNA#1121, ABE7.10 VRQR CP6 gRNA#1121, ABE7.9 saABE gRNA#820, and ABE7.10 saABE gRNA#820. The percent correction of R83C using various ABE base editor variants was assessed relative to a negative control (FIG. 13B).

[0956] As shown in FIG. 13B, ABE base editor saABE 7.10 with gRNA #820 achieved the best A>G correction of the R83C mutation when compared to bystander (Y85H) editing. An ABE base editor with gRNA #1121 using an NGA PAM yielded unfavorable bystander (Y85H) editing indicating that the nucleobase A10 is not ideal for ABE VRQR. The presence of circular permutant 5 and 6 increased A>G base editing at nucleobase A10.

### Example 3.4 Editor Optimization for Correction of GSD1a R83C Mutation in HEK293T Cells

[0957] To determine optimal ABE base editors for correcting the R83C mutation in GSD1a, various heterodimer saCas9-ABE (saABE) base editors were electroporated into the HEK293T-R83C cells. The base editors were prepared with mRNA IVTs off of oADE001/002 cDNA PCR with 2.5 μg base editor and 1 μg guide RNA. The HEK293T pLenti G6PC R83C cells were p′7-20, 200k cells/well in triplicate.

[0958] A target/spacer nucleic acid sequence for the R83C mutation is shown below. The target/spacer nucleic acid sequence shows on target (bold, italicized and underlined font), synonymous (italicized and underlined) and bystander (italicized) “a” nucleobases. Protospacer bases are bolded, the PAM is bolded and underlined, and bases outside of the protospacer are lowercase. The R83C mutation may be targeted using an NNGRRT PAM variant (e.g., GAGAAT).

ccACCAGTATGGAC [symbol] CTGTCCAAAGAGAAT

[0959] The corresponding amino acid sequence is as follows:
[0960] WWYPCQGFLI

[0961] The gRNA sequence (#820), which hybridizes to the complement of the G6PC DNA target sequence, is shown below:

CCAGUAUGGACACUGUCCAAA GAGAAT

[0962] The NNGRRT PAM sequence (i.e., SaCas9) is underlined above.

[0963] For the above gRNA sequence, the scaffold sequence is as follows:

GUUUUAGUACUCUGUAAUGAAAAUUACAGAAUCUACUAAAACAAGGCAA
AAUGCCGUGUUUAUCUCGUCAACUUGUUGGCGAGAUUUU

[0964] The editing efficiency for on target (A12G), synonymous (A10G), bystander (A6G, A0G), and combination editing of A6G+A10G and A6G+A12G using various saCas9-ABE (saABE) base editor heterodimer variant constructs were tested for correction of the GSD1a R83C mutation (FIG. 14). The percent correction of R83C using various ABE base editor variants was assessed relative to a monomer TadA-saCas9 positive control and GFP and untreated negative controls (FIG. 14). The saABE base editor variant heterodimer constructs include: TadA*8.14 ((WT)+(TadA7.10+Y147T))−saCas9; TadA*8.15 ((WT)+(TadA7.10+Y147R))−saCas9, TadA*8.18 ((WT)+(TadA7.10+V82S))−saCas9, TadA*8.20 ((WT)+(TadA7.10+Q154R))−saCas9, and TadA*8.16 ((WT)+(TadA7.10+Q154S))−saCas9.

[0965] Direct correction of the R83C mutation involves A>G conversion at position 12G within the protospacer region. Bystander (Y85H (TAC>CAC)) at position 6G may reduce G6PC activity as the mutation is located in the active site of the enzyme, however, it is predicted to be no less active than R83C. Conversion at 10G is synonymous, i.e., TGT>CGC (Cysteine>Arginine)

### Example 3.5 Double Mutant Editor Optimization for Correction of GSD1a R83C Mutation in HEK293T Cells

[0966] The percent correction of R83C using various double mutant monomer and heterodimer ABE8 saCas9 nickase (saCas9n) ABE (saABE) base editor variants was assessed. The double mutant base editors were prepared with mRNA IVTs off of oADE001/002 cDNA PCR with 2.5 μg base editor and 1 μg guide RNA. The HEK293T pLenti G6PC R83C cells were p7-20, 200 k cells/well in triplicate.

[0967] A target/spacer nucleic acid sequence for the R83C mutation is shown below. The target/spacer nucleic acid sequence shows on target (bold, italicized and underlined font), synonymous (italicized and underlined) and bystander (italicized) “a” nucleobases. Protospacer bases are bolded, the PAM is bolded and underlined, and bases outside of the protospacer are lowercase. The R83C mutation may be targeted using an NNGRRT PAM variant (e.g., GAGAAT).

ccACCAGTATGGAC [symbol] CTGTCCAAAGAGAAT

[0968] The corresponding amino acid sequence is as follows:
[0969] WWYPCQGFLI

[0970] The gRNA sequence (#820), which hybridizes to the complement of the G6PC DNA target sequence, is shown below:

CCAGUAUGGACaCUGUCCAAA GAGAAT

[0971] The NNGRRT PAM sequence (i.e., SaCas9) is underlined above.

[0972] For the above gRNA sequence, the scaffold sequence is as follows:

GUUUUAGUACUCUGUAAUGAAAAUUACAGAAUCUACUAAAACAAGGCAAA
AUGCCGUGUUUAUCUCGUCAACUUGUUGGCGAGAUUUU

[0973] The editing efficiency for on target (A12G), synonymous (A10G), bystander (A6G, A0G), and combination (A6G+A10G and A6G+A12G) correction of the GSD1a R83C mutation using various saCas9n-ABE (saABE) base editor double mutant monomer and heterodimer variant constructs were tested (FIG. 15). The percent correction of R83C using various double mutant ABE base editor variants was assessed relative to a monomer TadA-saCas9n positive control and a heterodimer TadA-saCas9n positive control (FIG. 15). The saABE base editor variant monomer constructs include: TadA*8.1 (TadA7.10+Y147T)−saCas9n; TadA*8.2 (TadA7.10+Y147R)−saCas9n; TadA*8.3 (TadA7.10+Q154S)−saCas9n; TadA*8.12 (TadA7.10+Y147T+Q154S)−saCas9n; and TadA*8.27 (TadA7.10+Y147R+Q154S)−saCas9n.

[0974] The saABE base editor variant heterodimer constructs include: TadA*8.14 ((WT)+(TadA7.10+Y147T))−saCas9n; TadA*8.15 ((WT)+(TadA7.10+Y147R))−saCas9n; TadA*8.20 ((WT)+(TadA7.10+Q154R))−saCas9n; TadA*8.25 ((WT)+(TadA7.10+Y147T/Q154S))−saCas9n; and TadA*8.33 ((WT)+(TadA7.10+Y147R+Q154S))−saCas9n.

[0975] Direct correction of the R83C mutation involves A>G conversion at position 12G within the protospacer region. Bystander (Y85H (TAC>CAC)) at position 6G may reduce G6PC activity as the mutation is located in the active site of the enzyme, however, it is predicted to be no less active than R83C. Conversion at 10G is synonymous, i.e., TGT>CGC (Cysteine>Arginine).

[0976] The purpose of further editor optimization experiments by inclusion of two mutations as opposed to single mutations in the TadA-SaCas9 editor for R83C targeting was to achieve increased levels of on-target editing or further unlink the editing at 12G and 6G. None of the double mutants tested yield improved on-target editing, but they do maintain similar levels of editing to single mutants tested. As shown in FIG. 15, TadA-SaCas9 editors yield 30-40% A>G conversion at the target site, and about 20% bystander edit. Sequencing showed that these edits predominantly occur in an unlinked fashion, with high frequency of on-target edits without bystander edits. For example, dimeric TadA-SaCas9 pGL83 generates the edits shown in Table 14 below.

TABLE 14
TadA-SaCas9 A>G Base Editing Frequency.

| Sequencing of dimeric | Base Edit- |
|---|---|
| TadA-SaCas9 pGL83 | ing (%) |
| CCAGTATGGACACTGTCCAAA | 35.79 |
| CCAGTATGGACGCTGTCCAAA | 33.27 |
| CCAGTGTGGACACTGTCCAAA | 19.47 |
| CCAGTATGGGCACTGTCCAAA | 4.87 |
| CCAGTGTGGACGCTGTCCAAA | 3.43 |
| CCAGTATGGGCGCTGTCCAAA | 1.10 |

[0977] Shown in bold and underlined is the A>G nucleobase on target correction of R83C. Shown in bold and italicized is the A>G nucleobase bystander correction of Y85C.

### Example 3.6 Reproducibility Study of Optimized Editors for GSD1a R83C Correction in HEK293T Cells

[0978] The reproducibility of GSD1a R83C correction with optimized editors was assessed as shown in FIG. 16.

[0979] A target/spacer nucleic acid sequence for the R83C mutation is shown below. The target/spacer nucleic acid sequence shows on target (bold, italicized and underlined font), synonymous (italicized and underlined) and bystander (italicized) “a” nucleobases. Protospacer bases are bolded, the PAM is bolded and underlined, and bases outside of the protospacer are lowercase. The R83C mutation may be targeted using an NNGRRT PAM variant (e.g., GAGAAT).

ccACCAGTATGGAC [symbol] CTGTCCAAAGAGAAT

[0980] The corresponding amino acid sequence is as follows:

WWYPCQGFLI

[0981] The gRNA sequence (#820), which hybridizes to the complement of the G6PC DNA target sequence, is shown below:

CCAGUAUGGACaCUGUCCAAA GAGAAT

The NNGRRT PAM sequence (i.e., SaCas9) is underlined above.

[0982] For the above gRNA sequence, the scaffold sequence is as follows:

GUUUUAGUACUCUGUAAUGAAAAUUACAGAAUCUACUAAAACAAGGCAAA
AUGCCGUGUUUAUCUCGUCAACUUGUUGGCGAGAUUUU

[0983] The editing efficiency for on target (A12G), synonymous (A₁₀G), and bystander (A6G, A0G) correction of the GSD1a R83C mutation using various optimized ABE base editors were tested (FIG. 16). The percent correction of R83C using ABE base editor variants was assessed relative to pGL78 monomer ABE7.10 positive control (FIG. 15). The ABE base editor variant r constructs include: pGL97 monomer Q154S (TadA*8.3); pGL95 monomer Y147T (TadA*8.1); pGL98 monomer Y147T+Q154S (TadA*8.12); pGL83 dimer Q154S (TadA*8.16); pGL79 dimer Y147T (TadA*8.14); and pGL93 dimer Y147T+Q154S (TadA*8.25)

[0984] As shown in FIG. 16, optimized heterodimer ABE base editor variants showed better on target (12A) A>G base editing efficiency as compared to bystander for the correction of GSD1a R83C mutation.

### Example 3.7 Guide RNA Truncation Studies for GSD1a R83C Correction in HEK293 Cells

[0985] Guide RNA truncation studies were performed for GSD1a R83C correction to understand the effect of altering guide length would have on editing (e.g., altering on- and off-target activity). In one experiment, guides of varying length targeting the R83C site were tested with the ABE variant comprising a monomer TadA fused to SaCas9 (pGL78):

CCAGUAUGGACaCUGUCCAAA (21 nt)
CAGUAUGGACaCUGUCCAAA (20 nt)
AGUAUGGACaCUGUCCAAA (19 nt)

[0986] Briefly, mRNA encoding base editor was in vitro transcribed and determined to be ˜70% purity by fragment analyzer. HEK293T cells (200K cells/well) having a lentiviral insertion with the G6PC R83C target sequence were transfected with 2.5 μg editor mRNA, 1 μg guide RNA in triplicate. Surprisingly, varying the length of the targeting region of the guide altered on-target editing at 12A (desirable) as well as off-target bystander editing at 6A (undesirable) (FIG. 18). In particular, the 19 nt and 20 nt guides showed increased on-target and decreased off-target editing with TadA-SaCas9 base editor. Without being bound by theory, guide RNAs that have high on-target activity and a high ratio of on-target editing to off-target editing are desirable for base editing.

[0987] In another experiment, various ABE8s were tested with the 20 nt and 21 nt guides (FIG. 19). Monomeric (TadA*8) and dimeric (TadA(wt)-TadA*8) variants showed increased ratios of on-target editing (12A; desirable) to off-target editing (6A; undesirable) when used with the 20 nt guides in comparison to when used with the 21 nt guides. In general, ABE editors with the 20 nt guides also showed higher on-target editing (12A; desirable) compared to their use with 21 nt guides. Compared to previous base editors, mono-R20A/K21A, mono-V82G, di-R20A/K21A, di-V82G, di/mono double mutant with 20 nt guide showed increased on-target and decreased off-target activities. An additional experiment showed that monomeric TadA7.10 comprising Y147T and Q1545 mutations fused to SaCas9 or heterodimeric TadA(wt)-TadA7.10 comprising Y147T, Q1545, and V82G mutations in combination with the 20 nt guide RNA provided high levels of on-target editing accompanied by low levels of off-target, bystander editing at the GSD1a R83C site (FIG. 20).

[0988] The base editor-guide combinations were also tested in the lentiviral transduced primary hepatocyte co-culture system described herein. Transduced co-cultures were transfected with diTadA-ABE7.10(Y147T/Q154S)-SaCas9 or monoTadA ABE7.10(Y147T/Q154S)-SaCas9 (MSP602 or MSP603, respectively) and gRNA 820 (20 nt or 21 nt). All mRNA/gRNA combinations yielded specific on-target (12G) editing in transduced hepatocytes. Transfection with gRNA820-20 nt yielded increased levels of on-target editing (FIG. 21). In another experiment, testing some of the previously tested base editor-guide combinations (i.e. Variant 3-5 conditions), significant levels of precise R83C correction were observed in the primary human hepatocyte model (FIG. 22).

### Example 4. Precise Correction In Vivo in Heterozygous Transgenic GSD1A R83C Mice

[0989] Molecular proof of concept studies for precise correction of G6PC R83C were conducted in a humanized transgenic mouse model for GSD1a. Animals were dosed with LNPs co-formulated with editor mRNA and gRNA in two separate studies. Study 1 was conducted with 10-15 week old animals and taken-down (TD) at 7 days post dosing. Animals from Study 2 were 8-11 week old and taken down 2 weeks post LNP dosing. Subsequent to take down, livers were isolated, homogenized, with PCR and next-generation sequencing analysis conducted at and around the target site.

[0990] The transgenic mouse model was generated at Applied StemCell (Miliptas, Calif.) by knock-out of the mouse G6PC gene and knock-in of human G6PC cDNA using a single-stranded DNA (ssDNA) donor (˜1.2kb), designed to harbor the point mutation R83C (CGT>TGT) in the human cDNA transcript (G6PC-201, ENST00000253801.6). The editor used was the heterodimer SaABE8.12 (V82G), also listed as Heterodimer SaABE8 (Y147T, Q154S, V82G). The gRNA had the following sequence: CAGTATGGACACTGTCCAAA.

[0991] A target/spacer nucleic acid sequence for the R83C mutation is shown below.

CCAGTATGGACACTGTCCAAA

The target/spacer nucleic acid sequence shows on target (bold font), synonymous (italicized font) and bystander (underlined font) “A” nucleobases. The R83C mutation may be targeted using a GAGAAT PAM sequence.

[0992] As shown in FIG. 23, transgenic mice harboring human G6PC with the R83C mutation yielded ˜15-25% on-target precise correction of R83C, and bystander edits resulting in the Y85H mutation were low (˜2-7%).

### Example 5. Materials and Methods

[0993] The results provided in the Examples described herein were obtained using the following materials and methods.

[0994] DNA sequences of target polynucleotides and gRNAs and primers used are described herein. For gRNAs, the following scaffold sequence is presented: GUUUUAGAGC UAGAAAUAGC AAGUUAAAAU AAGGCUAGUC CGUUAUCAAC UUGAAAAAGU GGCACCGAGU CGGUGCUUUU. This scaffold may be used for the NGG, NGA, NGC, NGT PAMs (i.e. SpCas9). The following scaffold sequence: GUUUUAGUAC UCUGUAAUGA AAAUUACAGA AUCUACUAAA ACAAGGCAAA AUGCCGUGUU UAUCUCGUCA ACUUGUUGGC GAGAUUUU may be used for the NNGRRT PAMs (i.e. SaCas9). The gRNA encompasses the scaffold sequence and the spacer sequence (target sequence) for disease-associated genes (e.g., Tables 3A and 3B) as provided herein or as determined based on the knowledge of the skilled practitioner and as would be understood to the skilled practitioner in the art. (See, e.g., Komor, A. C., et al., “Programmable editing of a target base in genomic DNA without double-stranded DNA cleavage” Nature 533, 420-424 (2016); Gaudelli, N. M., et al., “Programmable base editing of A•T to G•C in genomic DNA without DNA cleavage” Nature 551, 464-471 (2017); Komor, A. C., et al., “Improved base excision repair inhibition and bacteriophage Mu Gam protein yields C:G-to-T:A base editors with higher efficiency and product purity” Science Advances 3:eaao4774 (2017), and Rees, H. A., et al., “Base editing: precision chemistry on the genome and transcriptome of living cells.” Nat Rev Genet. 2018 December; 19(12):770-788. doi: 10.1038/s41576-018-0059-1).

[0995] PCR was performed using VeraSeq ULtra DNA polymerase (Enzymatics), or Q5 Hot Start High-Fidelity DNA Polymerase (New England Biolabs). Base Editor (BE) plasmids were constructed using USER cloning (New England Biolabs). Deaminase genes were synthesized as gBlocks Gene Fragments (Integrated DNA Technologies). Cas9 genes used are listed below. Cas9 genes were obtained from previously reported plasmids. Deaminase and fusion genes were cloned into pCMV (mammalian codon-optimized) or pET28b (E. coli codon-optimized) backbones. sgRNA expression plasmids were constructed using site-directed mutagenesis.

[0996] Briefly, the primers listed herein above were 5′ phosphorylated using T4 Polynucleotide Kinase (New England Biolabs) according to the manufacturer's instructions.

[0997] Next, PCR was performed using Q5 Hot Start High-Fidelity Polymerase (New England Biolabs) with the phosphorylated primers and the plasmid encoding a gene of interest as a template according to the manufacturer's instructions. PCR products were incubated with DpnI (20 U, New England Biolabs) at 37 ° C. for 1 hour, purified on a QIAprep spin column (Qiagen), and ligated using QuickLigase (New England Biolabs) according to the manufacturer's instructions. DNA vector amplification was carried out using Mach1 competent cells (ThermoFisher Scientific).

### Cell Culture

[0998] HEK293T (ATCC CRL-3216) and U2OS (ATCC HTB-96) were maintained in Dulbecco's Modified Eagle's Medium plus GlutaMax (ThermoFisher) supplemented with 10% (v/v) fetal bovine serum (FBS), at 37 ° C. with 5% CO2. HCC1954 cells (ATCC CRL-2338) were maintained in RPMI-1640 medium (ThermoFisher Scientific) supplemented as described above. Immortalized cells containing the gene of interest (e.g. SERPINA1, G6PC, IDUA, etc.) (Taconic Biosciences) were cultured in Dulbecco's Modified Eagle's Medium plus GlutaMax (ThermoFisher Scientific) supplemented with 10% (v/v) fetal bovine serum (FBS) and 200 μg ml-1 Geneticin (ThermoFisher Scientific).

[0999] The HEK293T (293T) cell line was obtained from the American Tissue Culture Collection (ATCC). 293T cells were maintained in DMEM supplemented with 10% fetal bovine serum and 1% penicillin/streptomycin at 37° C. with 5% CO₂. All cell lines were transfected in 24-well plates with Lipofectamine 2000 (Invitrogen), following the manufacturer's instructions. The amount of DNA used for lipofection was 1 μg per well. Transfection efficiency was routinely higher than 80% for 293T cells as determined by fluorescent microscopy following delivery of a control GFP expression plasmid.

### Transfections.

[1000] HEK293T cells were seeded on 48-well collagen-coated BioCoat plates (Corning) and transfected at approximately 85% confluency. Briefly, 750 ng of BE and 250 ng of sgRNA expression plasmids were transfected using 1.5 μl of Lipofectamine 2000 (ThermoFisher Scientific) per well according to the manufacturer's protocol. HEK293T cells were transfected using appropriate Amaxa Nucleofector II programs according to manufacturer's instructions (V kits using program Q-001 for HEK293T cells).

[1001] For plasmid transfections, HEK293T cells were plated and transfected with 250 ng of expression plasmid containing a U6 promoter and encoding the gRNA and with 750 ng of expression plasmid encoding the Cas9/ABE8 variant base editor using Opti-MEM media and Lipofectamine 2000. The ABE8 variants used included the NGG PAM sequence. The cells were maintained 37° C. with 5% CO2 for 5 days, with a change of medicum at day 3 post transfection. Thereafter, the cells were lysed; genomic DNA was isolated and PCR was performed using standard procedures, typically using 20-100 ng of template DNA. After the addition of adapters (Illumina), the DNA was subjected to deep sequencing. Base editing at the desired site was analyzed by MiSeq analysis.

### High-Throughput DNA Sequencing of Genomic DNA Samples.

[1002] Transfected cells were harvested after 3 days and the genomic DNA was isolated using the Agencourt DNAdvance Genomic DNA Isolation Kit (Beckman Coulter) according to the manufacturer's instructions. On-target and off-target genomic regions of interest were amplified by PCR with flanking high-throughput sequencing primer pair. PCR amplification was carried out with Phusion high-fidelity DNA polymerase (ThermoFisher) according to the manufacturer's instructions using 5 ng of genomic DNA as a template. Cycle numbers were determined separately for each primer pair as to ensure the reaction was stopped in the linear range of amplification. PCR products were purified using RapidTips (Diffinity Genomics). Purified DNA was amplified by PCR with primers containing sequencing adaptors. The products were gel purified and quantified using the Quant-iT PicoGreen dsDNA Assay Kit (ThermoFisher) and KAPA Library Quantification Kit-Illumina (KAPA Biosystems). Samples were sequenced on an Illumina MiSeq as previously described (Pattanayak, Nature Biotechnol. 31, 839-843 (2013)).

[1003] Deep sequencing was performed on PCR amplicons from genomic DNA or RNA harvested from duplicate transfections of 293T cells. After validating the quality of PCR product by gel electrophoresis, the PCR products were isolated by gel extraction, e.g., using the Zymoclean Gel DNA Recovery Kit (Zymo Research). Shotgun libraries were prepared without shearing. The library was quantified by qPCR and sequenced on one MiSeq Nano flowcell for 251 cycles from each end of the fragments using a MiSeq 500-cycle sequencing kit version 2. Fastq files were generated and demultiplexed with the bcl2fastq v2.17.1.14 Conversion Software (Illumina).

### Other Embodiments

[1004] From the foregoing description, it will be apparent that variations and modifications may be made to the invention described herein to adopt it to various usages and conditions. Such embodiments are also within the scope of the following claims.

[1005] The recitation of a listing of elements in any definition of a variable herein includes definitions of that variable as any single element or combination (or subcombination) of listed elements. The recitation of an embodiment herein includes that embodiment as any single embodiment or in combination with any other embodiments or portions thereof.

[1006] All publications, patents, and patent applications mentioned in this specification are herein incorporated by reference to the same extent as if each individual publication, patent, or patent application was specifically and individually indicated to be incorporated by reference. Absent any indication otherwise, publications, patents, and patent applications mentioned in this specification are incorporated herein by reference in their entireties.

The application's sequence listing, which the Patent Office published only in electronic form, follows.

SEQUENCE LISTING (186 sequences)

SEQ ID NO: 1 - protein, 1368 aa, Streptococcus pyogenes [sequence omitted]

SEQ ID NO: 2 - protein, 167 aa, Unknown
  Description of Unknown: TadA sequence
MSEVEFSHEYWMRHALTLAKRAWDEREVPVGAVLVHNNRVIGEGWNRPIGRHDPTAHAEIMALRQGGLVMQNYRLIDATLYVTLEPCVMCAGAMIHSRIGRVVFGARDAKTGAAGSLMDVLHHPGMNHRVEITEGILADECAALLSDFFRMRRQEIKAQKKAQSSTD

SEQ ID NO: 3 - protein, 167 aa, Artificial Sequence
  Description of Artificial Sequence: Synthetic polypeptide
MSEVEFSHEYWMRHALTLAKRARDEREVPVGAVLVLNNRVIGEGWNRAIGLHDPTAHAEIMALRQGGLVMQNYRLIDATLYVTFEPCVMCAGAMIHSRIGRVVFGVRNAKTGAAGSLMDVLHYPGMNHRVEITEGILADECAALLCYFFRMPRQVFNAQKKAQSSTD

SEQ ID NO: 4 - RNA, 20 nt, Artificial Sequence
  Description of Artificial Sequence: Synthetic oligonucleotide
gaccuaggcgaggcaguagg

SEQ ID NO: 5 - RNA, 21 nt, Artificial Sequence
  Description of Artificial Sequence: Synthetic oligonucleotide
ccaguauggacacuguccaaa

SEQ ID NO: 6 - RNA, 20 nt, Artificial Sequence
  Description of Artificial Sequence: Synthetic oligonucleotide
caguauggacacuguccaaa

SEQ ID NO: 7 - RNA, 20 nt, Artificial Sequence
  Description of Artificial Sequence: Synthetic oligonucleotide
aguauggacacuguccaaag

SEQ ID NO: 8 - protein, 167 aa, Artificial Sequence
  Description of Artificial Sequence: Synthetic polypeptide
MSEVEFSHEYWMRHALTLAKRARDEREVPVGAVLVLNNRVIGEGWNRAIGLHDPTAHAEIMALRQGGLVMQNYRLIDATLYVTFEPCVMCAGAMIHSRIGRVVFGVRNAKTGAAGSLMDVLHYPGMNHRVEITEGILADECAALLCTFFRMPRQVFNAQKKAQSSTD

SEQ ID NO: 9 - RNA, 80 nt, Artificial Sequence
  Description of Artificial Sequence: Synthetic oligonucleotide
guuuuagagcuagaaauagcaaguuaaaauaaggcuaguccguuaucaacuugaaaaaguggcaccgagucggugcuuuu

SEQ ID NO: 10 - RNA, 88 nt, Artificial Sequence
  Description of Artificial Sequence: Synthetic oligonucleotide
guuuuaguacucuguaaugaaaauuacagaaucuacuaaaacaaggcaaaaugccguguuuaucucgucaacuuguuggcgagauuuu

SEQ ID NO: 11 - protein, 1410 aa, Artificial Sequence
  Description of Artificial Sequence: Synthetic polypeptide
EIGKATAKYFFYSNIMNFFKTEITLANGEIRKRPLIETNGETGEIVWDKGRDFATVRKVLSMPQVNIVKKTEVQTGGFSKESILPKRNSDKLIARKKDWDPKKYGGFMQPTVAYSVLVVAKVEKGKSKKLKSVKELLGITIMERSSFEKNPIDFLEAKGYKEVKKDLIIKLPKYSLFELENGRKRMLASAKFLQKGNELALPSKYVNFLYLASHYEKLKGSPEDNEQKQLFVEQHKHYLDEIIEQISEFSKRVILADANLDKVLSAYNKHRDKPIREQAENIIHLFTLTNLGAPRAFKYFDTTIARKEYRSTKEVLDATLIHQSITGLYETRIDLSQLGGDGGSGGSGGSGGSGGSGGSGGMDKKYSIGLAIGTNSVGWAVITDEYKVPSKKFKVLGNTDRHSIKKNLIGALLFDSGETAEATRLKRTARRRYTRRKNRICYLQEIFSNEMAKVDDSFFHRLEESFLVEEDKKHERHPIFGNIVDEVAYHEKYPTIYHLRKKLVDSTDKADLRLIYLALAHMIKFRGHFLIEGDLNPDNSDVDKLFIQLVQTYNQLFEENPINASGVDAKAILSARLSKSRRLENLIAQLPGEKKNGLFGNLIALSLGLTPNFKSNFDLAEDAKLQLSKDTYDDDLDNLLAQIGDQYADLFLAAKNLSDAILLSDILRVNTEITKAPLSASMIKRYDEHHQDLTLLKALVRQQLPEKYKEIFFDQSKNGYAGYIDGGASQEEFYKFIKPILEKMDGTEELLVKLNREDLLRKQRTFDNGSIPHQIHLGELHAILRRQEDFYPFLKDNREKIEKILTFRIPYYVGPLARGNSRFAWMTRKSEETITPWNFEEVVDKGASAQSFIERMTNFDKNLPNEKVLPKHSLLYEYFTVYNELTKVKYVTEGMRKPAFLSGEQKKAIVDLLFKTNRKVTVKQLKEDYFKKIECFDSVEISGVEDRFNASLGTYHDLLKIIKDKDFLDNEENEDILEDIVLTLTLFEDREMIEERLKTYAHLFDDKVMKQLKRRRYTGWGRLSRKLINGIRDKQSGKTILDFLKSDGFANRNFMQLIHDDSLTFKEDIQKAQVSGQGDSLHEHIANLAGSPAIKKGILQTVKVVDELVKVMGRHKPENIVIEMARENQTTQKGQKNSRERMKRIEEGIKELGSQILKEHPVENTQLQNEKLYLYYLQNGRDMYVDQELDINRLSDYDVDHIVPQSFLKDDSIDNKVLTRSDKNRGKSDNVPSEEVVKKMKNYWRQLLNAKLITQRKFDNLTKAERGGLSELDKAGFIKRQLVETRQITKHVAQILDSRMNTKYDENDKLIREVKVITLKSKLVSDFRKDFQFYKVREINNYHHAHDAYLNAVVGTALIKKYPKLESEFVYGDYKVYDVRKMIAKSEQEGADKRTADGSEFESPKKKRKV

SEQ ID NO: 12 - protein, 160 aa, Staphylococcus aureus
MGSHMTNDIYFMTLAIEEAKKAAQLGEVPIGAIITKDDEVIARAHNLRETLQQPTAHAEHIAIERAAKVLGSWRLEGCTLYVTLEPCVMCAGTIVMSRIPRVVYGADDPKGGCSGSLMNLLQQSNFNHRAIVDKGVLKEACSTLLTTFFKNLRANKKSTN

SEQ ID NO: 13 - protein, 161 aa, Bacillus subtilis
MTQDELYMKEAIKEAKKAEEKGEVPIGAVLVINGEIIARAHNLRETEQRSIAHAEMLVIDEACKALGTWRLEGATLYVTLEPCPMCAGAVVLSRVEKVVFGAFDPKGGCSGTLMNLLQEERFNHQAEVVSGVLEEECGGMLSAFFRELRKKKKAARKNLSE

SEQ ID NO: 14 - protein, 183 aa, Salmonella typhimurium
MPPAFITGVTSLSDVELDHEYWMRHALTLAKRAWDEREVPVGAVLVHNHRVIGEGWNRPIGRHDPTAHAEIMALRQGGLVLQNYRLLDTTLYVTLEPCVMCAGAMVHSRIGRVVFGARDAKTGAAGSLIDVLHHPGMNHRVEIIEGVLRDECATLLSDFFRMRRQEIKALKKADRAEGAGPAV

SEQ ID NO: 15 - protein, 164 aa, Shewanella putrefaciens
MDEYWMQVAMQMAEKAEAAGEVPVGAVLVKDGQQIATGYNLSISQHDPTAHAEILCLRSAGKKLENYRLLDATLYITLEPCAMCAGAMVHSRIARVVYGARDEKTGAAGTVVNLLQHPAFNHQVEVTSGVLAEACSAQLSRFFKRRRDEKKALKLAQRAQQGIE

SEQ ID NO: 16 - protein, 173 aa, Haemophilus influenzae
MDAAKVRSEFDEKMMRYALELADKAEALGEIPVGAVLVDDARNIIGEGWNLSIVQSDPTAHAEIIALRNGAKNIQNYRLLNSTLYVTLEPCTMCAGAILHSRIKRLVFGASDYKTGAIGSRFHFFDDYKMNHTLEITSGVLAEECSQKLSTFFQKRREEKKIEKALLKSLSDK

SEQ ID NO: 17 - protein, 161 aa, Caulobacter crescentus
MRTDESEDQDHRMMRLALDAARAAAEAGETPVGAVILDPSTGEVIATAGNGPIAAHDPTAHAEIAAMRAAAAKLGNYRLTDLTLVVTLEPCAMCAGAISHARIGRVVFGADDPKGGAVVHGPKFFAQPTCHWRPEVTGGVLADESADLLRGFFRARRKAKI

SEQ ID NO: 18 - protein, 179 aa, Geobacter sulfurreducens
MSSLKKTPIRDDAYWMGKAIREAAKAAARDEVPIGAVIVRDGAVIGRGHNLREGSNDPSAHAEMIAIRQAARRSANWRLTGATLYVTLEPCLMCMGAIILARLERVVFGCYDPKGGAAGSLYDLSADPRLNHQVRLSPGVCQEECGTMLSDFFRDLRRRKKAKATPALFIDERKVPPEP

SEQ ID NO: 19 - DNA, 8811 bp, Artificial Sequence
  Description of Artificial Sequence: Synthetic polynucleotide
atatgccaagtacgccccctattgacgtcaatgacggtaaatggcccgcctggcattatgcccagtacatgaccttatgggactttcctacttggcagtacatctacgtattagtcatcgctattaccatggtgatgcggttttggcagtacatcaatgggcgtggatagcggtttgactcacggggatttccaagtctccaccccattgacgtcaatgggagtttgttttggcaccaaaatcaacgggactttccaaaatgtcgtaacaactccgccccattgacgcaaatgggcggtaggcgtgtacggtgggaggtctatataagcagagctggtttagtgaaccgtcagatccgctagagatccgcggccgctaatacgactcactatagggagagccgccaccatgaaacggacagccgacggaagcgagttcgagtcaccaaagaagaagcggaaagtctctgaagtcgagtttagccacgagtattggatgaggcacgcactgaccctggcaaagcgagcatgggatgaaagagaagtccccgtgggcgccgtgctggtgcacaacaatagagtgatcggagagggatggaacaggccaatcggccgccacgaccctaccgcacacgcagagatcatggcactgaggcagggaggcctggtcatgcagaattaccgcctgatcgatgccaccctgtatgtgacactggagccatgcgtgatgtgcgcaggagcaatgatccacagcaggatcggaagagtggtgttcggagcacgggacgccaagaccggcgcagcaggctccctgatggatgtgctgcaccaccccggcatgaaccaccgggtggagatcacagagggaatcctggcagacgagtgcgccgccctgctgagcgatttctttagaatgcggagacaggagatcaaggcccagaagaaggcacagagctccaccgactctggaggatctagcggaggatcctctggaagcgagacaccaggcacaagcgagtccgccacaccagagagctccggcggctcctccggaggatcctctgaggtggagttttcccacgagtactggatgagacatgccctgaccctggccaagagggcacgcgatgagagggaggtgcctgtgggagccgtgctggtgctgaacaatagagtgatcggcgagggctggaacagagccatcggcctgcacgacccaacagcccatgccgaaattatggccctgagacagggcggcctggtcatgcagaactacagactgattgacgccaccctgtacgtgacattcgagccttgcgtgatgtgcgccggcgccatgatccactctaggatcggccgcgtggtgtttggcgtgaggaacgcaaaaaccggcgccgcaggctccctgatggacgtgctgcactaccccggcatgaatcaccgcgtcgaaattaccgagggaatcctggcagatgaatgtgccgccctgctgtgctatttctttcggatgcctagacaggtgttcaatgctcagaagaaggcccagagctccaccgactccggaggatctagcggaggctcctctggctctgagacacctggcacaagcgagagcgcaacacctgaaagcagcgggggcagcagcggggggtcagacaagaagtacagcatcggcctggccatcggcaccaactctgtgggctgggccgtgatcaccgacgagtacaaggtgcccagcaagaaattcaaggtgctgggcaacaccgaccggcacagcatcaagaagaacctgatcggagccctgctgttcgacagcggcgaaacagccgaggccacccggctgaagagaaccgccagaagaagatacaccagacggaagaaccggatctgctatctgcaagagatcttcagcaacgagatggccaaggtggacgacagcttcttccacagactggaagagtccttcctggtggaagaggataagaagcacgagcggcaccccatcttcggcaacatcgtggacgaggtggcctaccacgagaagtaccccaccatctaccacctgagaaagaaactggtggacagcaccgacaaggccgacctgcggctgatctatctggccctggcccacatgatcaagttccggggccacttcctgatcgagggcgacctgaaccccgacaacagcgacgtggacaagctgttcatccagctggtgcagacctacaaccagctgttcgaggaaaaccccatcaacgccagcggcgtggacgccaaggccatcctgtctgccagactgagcaagagcagacggctggaaaatctgatcgcccagctgcccggcgagaagaagaatggcctgttcggaaacctgattgccctgagcctgggcctgacccccaacttcaagagcaacttcgacctggccgaggatgccaaactgcagctgagcaaggacacctacgacgacgacctggacaacctgctggcccagatcggcgaccagtacgccgacctgtttctggccgccaagaacctgtccgacgccatcctgctgagcgacatcctgagagtgaacaccgagatcaccaaggcccccctgagcgcctctatgatcaagagatacgacgagcaccaccaggacctgaccctgctgaaagctctcgtgcggcagcagctgcctgagaagtacaaagagattttcttcgaccagagcaagaacggctacgccggctacattgacggcggagccagccaggaagagttctacaagttcatcaagcccatcctggaaaagatggacggcaccgaggaactgctcgtgaagctgaacagagaggacctgctgcggaagcagcggaccttcgacaacggcagcatcccccaccagatccacctgggagagctgcacgccattctgcggcggcaggaagatttttacccattcctgaaggacaaccgggaaaagatcgagaagatcctgaccttccgcatcccctactacgtgggccctctggccaggggaaacagcagattcgcctggatgaccagaaagagcgaggaaaccatcaccccctggaacttcgaggaagtggtggacaagggcgcttccgcccagagcttcatcgagcggatgaccaacttcgataagaacctgcccaacgagaaggtgctgcccaagcacagcctgctgtacgagtacttcaccgtgtataacgagctgaccaaagtgaaatacgtgaccgagggaatgagaaagcccgccttcctgagcggcgagcagaaaaaggccatcgtggacctgctgttcaagaccaaccggaaagtgaccgtgaagcagctgaaagaggactacttcaagaaaatcgagtgcttcgactccgtggaaatctccggcgtggaagatcggttcaacgcctccctgggcacataccacgatctgctgaaaattatcaaggacaaggacttcctggacaatgaggaaaacgaggacattctggaagatatcgtgctgaccctgacactgtttgaggacagagagatgatcgaggaacggctgaaaacctatgcccacctgttcgacgacaaagtgatgaagcagctgaagcggcggagatacaccggctggggcaggctgagccggaagctgatcaacggcatccgggacaagcagtccggcaagacaatcctggatttcctgaagtccgacggcttcgccaacagaaacttcatgcagctgatccacgacgacagcctgacctttaaagaggacatccagaaagcccaggtgtccggccagggcgatagcctgcacgagcacattgccaatctggccggcagccccgccattaagaagggcatcctgcagacagtgaaggtggtggacgagctcgtgaaagtgatgggccggcacaagcccgagaacatcgtgatcgaaatggccagagagaaccagaccacccagaagggacagaagaacagccgcgagagaatgaagcggatcgaagagggcatcaaagagctgggcagccagatcctgaaagaacaccccgtggaaaacacccagctgcagaacgagaagctgtacctgtactacctgcagaatgggcgggatatgtacgtggaccaggaactggacatcaaccggctgtccgactacgatgtggaccatatcgtgcctcagagctttctgaaggacgactccatcgacaacaaggtgctgaccagaagcgacaagaaccggggcaagagcgacaacgtgccctccgaagaggtcgtgaagaagatgaagaactactggcggcagctgctgaacgccaagctgattacccagagaaagttcgacaatctgaccaaggccgagagaggcggcctgagcgaactggataaggccggcttcatcaagagacagctggtggaaacccggcagatcacaaagcacgtggcacagatcctggactcccggatgaacactaagtacgacgagaatgacaagctgatccgggaagtgaaagtgatcaccctgaagtccaagctggtgtccgatttccggaaggatttccagttttacaaagtgcgcgagatcaacaactaccaccacgcccacgacgcctacctgaacgccgtcgtgggaaccgccctgatcaaaaagtaccctaagctggaaagcgagttcgtgtacggcgactacaaggtgtacgacgtgcggaagatgatcgccaagagcgagcaggaaatcggcaaggctaccgccaagtacttcttctacagcaacatcatgaactttttcaagaccgagattaccctggccaacggcgagatccggaagcggcctctgatcgagacaaacggcgaaaccggggagatcgtgtgggataagggccgggattttgccaccgtgcggaaagtgctgagcatgccccaagtgaatatcgtgaaaaagaccgaggtgcagacaggcggcttcagcaaagagtctatcctgcccaagaggaacagcgataagctgatcgccagaaagaaggactgggaccctaagaagtacggcggcttcgacagccccaccgtggcctattctgtgctggtggtggccaaagtggaaaagggcaagtccaagaaactgaagagtgtgaaagagctgctggggatcaccatcatggaaagaagcagcttcgagaagaatcccatcgactttctggaagccaagggctacaaagaagtgaaaaaggacctgatcatcaagctgcctaagtactccctgttcgagctggaaaacggccggaagagaatgctggcctctgccggcgaactgcagaagggaaacgaactggccctgccctccaaatatgtgaacttcctgtacctggccagccactatgagaagctgaagggctcccccgaggataatgagcagaaacagctgtttgtggaacagcacaagcactacctggacgagatcatcgagcagatcagcgagttctccaagagagtgatcctggccgacgctaatctggacaaagtgctgtccgcctacaacaagcaccgggataagcccatcagagagcaggccgagaatatcatccacctgtttaccctgaccaatctgggagcccctgccgccttcaagtactttgacaccaccatcgaccggaagaggtacaccagcaccaaagaggtgctggacgccaccctgatccaccagagcatcaccggcctgtacgagacacggatcgacctgtctcagctgggaggtgactctggcggctcaaaaagaaccgccgacggcagcgaattcgagcccaagaagaagaggaaagtctaaccggtcatcatcaccatcaccattgagtttaaacccgctgatcagcctcgactgtgccttctagttgccagccatctgttgtttgcccctcccccgtgccttccttgaccctggaaggtgccactcccactgtcctttcctaataaaatgaggaaattgcatcgcattgtctgagtaggtgtcattctattctggggggtggggtggggcaggacagcaagggggaggattgggaagacaatagcaggcatgctggggatgcggtgggctctatggcttctgaggcggaaagaaccagctggggctcgataccgtcgacctctagctagagcttggcgtaatcatggtcatagctgtttcctgtgtgaaattgttatccgctcacaattccacacaacatacgagccggaagcataaagtgtaaagcctagggtgcctaatgagtgagctaactcacattaattgcgttgcgctcactgcccgctttccagtcgggaaacctgtcgtgccagctgcattaatgaatcggccaacgcgcggggagaggcggtttgcgtattgggcgctcttccgcttcctcgctcactgactcgctgcgctcggtcgttcggctgcggcgagcggtatcagctcactcaaaggcggtaatacggttatccacagaatcaggggataacgcaggaaagaacatgtgagcaaaaggccagcaaaaggccaggaaccgtaaaaaggccgcgttgctggcgtttttccataggctccgcccccctgacgagcatcacaaaaatcgacgctcaagtcagaggtggcgaaacccgacaggactataaagataccaggcgtttccccctggaagctccctcgtgcgctctcctgttccgaccctgccgcttaccggatacctgtccgcctttctcccttcgggaagcgtggcgctttctcatagctcacgctgtaggtatctcagttcggtgtaggtcgttcgctccaagctgggctgtgtgcacgaaccccccgttcagcccgaccgctgcgccttatccggtaactatcgtcttgagtccaacccggtaagacacgacttatcgccactggcagcagccactggtaacaggattagcagagcgaggtatgtaggcggtgctacagagttcttgaagtggtggcctaactacggctacactagaagaacagtatttggtatctgcgctctgctgaagccagttaccttcggaaaaagagttggtagctcttgatccggcaaacaaaccaccgctggtagcggtggtttttttgtttgcaagcagcagattacgcgcagaaaaaaaggatctcaagaagatcctttgatcttttctacggggtctgacactcagtggaacgaaaactcacgttaagggattttggtcatgagattatcaaaaaggatcttcacctagatccttttaaattaaaaatgaagttttaaatcaatctaaagtatatatgagtaaacttggtctgacagttaccaatgcttaatcagtgaggcacctatctcagcgatctgtctatttcgttcatccatagttgcctgactccccgtcgtgtagataactacgatacgggagggcttaccatctggccccagtgctgcaatgataccgcgagacccacgctcaccggctccagatttatcagcaataaaccagccagccggaagggccgagcgcagaagtggtcctgcaactttatccgcctccatccagtctattaattgttgccgggaagctagagtaagtagttcgccagttaatagtttgcgcaacgttgttgccattgctacaggcatcgtggtgtcacgctcgtcgtttggtatggcttcattcagctccggttcccaacgatcaaggcgagttacatgatcccccatgttgtgcaaaaaagcggttagctccttcggtcctccgatcgttgtcagaagtaagttggccgcagtgttatcactcatggttatggcagcactgcataattctcttactgtcatgccatccgtaagatgcttttctgtgactggtgagtactcaaccaagtcattctgagaatagtgtatgcggcgaccgagttgctcttgcccggcgtcaatacgggataataccgcgccacatagcagaactttaaaagtgctcatcattggaaaacgttcttcggggcgaaaactctcaaggatcttaccgctgttgagatccagttcgatgtaacccactcgtgcacccaactgatcttcagcatcttttactttcaccagcgtttctgggtgagcaaaaacaggaaggcaaaatgccgcaaaaaagggaataagggcgacacggaaatgttgaatactcatactcttcctttttcaatattattgaagcatttatcagggttattgtctcatgagcggatacatatttgaatgtatttagaaaaataaacaaataggggttccgcgcacatttccccgaaaagtgccacctgacgtcgacggatcgggagatcgatctcccgatcccctagggtcgactctcagtacaatctgctctgatgccgcatagttaagccagtatctgctccctgcttgtgtgttggaggtcgctgagtagtgcgcgagcaaaatttaagctacaacaaggcaaggcttgaccgacaattgcatgaagaatctgcttagggttaggcgttttgcgctgcttcgcgatgtacgggccagatatacgcgttgacattgattattgactagttattaatagtaatcaattacggggtcattagttcatagcccatatatggagttccgcgttacataacttacggtaaatggcccgcctggctgaccgcccaacgacccccgcccattgacgtcaataatgacgtatgttcccatagtaacgccaatagggactttccattgacgtcaatgggtggagtatttacggtaaactgcccacttggcagtacatcaagtgtatc

SEQ ID NO: 20 - protein, 1367 aa, Streptococcus pyogenes
MDKKYSIGLDIGTNSVGWAVITDDYKVPSKKFKVLGNTDRHSIKKNLIGALLFGSGETAEATRLKRTARRRYTRRKNRICYLQEIFSNEMAKVDDSFFHRLEESFLVEEDKKHERHPIFGNIVDEVAYHEKYPTIYHLRKKLADSTDKADLRLIYLALAHMIKFRGHFLIEGDLNPDNSDVDKLFIQLVQIYNQLFEENPINASRVDAKAILSARLSKSRRLENLIAQLPGEKRNGLFGNLIALSLGLTPNFKSNFDLAEDAKLQLSKDTYDDDLDNLLAQIGDQYADLFLAAKNLSDAILLSDILRVNSEITKAPLSASMIKRYDEHHQDLTLLKALVRQQLPEKYKEIFFDQSKNGYAGYIDGGASQEEFYKFIKPILEKMDGTEELLVKLNREDLLRKQRTFDNGSIPHQIHLGELHAILRRQEDFYPFLKDNREKIEKILTFRIPYYVGPLARGNSRFAWMTRKSEETITPWNFEEVVDKGASAQSFIERMTNFDKNLPNEKVLPKHSLLYEYFTVYNELTKVKYVTEGMRKPAFLSGEQKKAIVDLLFKTNRKVTVKQLKEDYFKKIECFDSVEISGVEDRFNASLGAYHDLLKIIKDKDFLDNEENEDILEDIVLTLTLFEDRGMIEERLKTYAHLFDDKVMKQLKRRRYTGWGRLSRKLINGIRDKQSGKTILDFLKSDGFANRNFMQLIHDDSLTFKEDIQKAQVSGQGHSLHEQIANLAGSPAIKKGILQTVKIVDELVKVMGHKPENIVIEMARENQTTQKGQKNSRERMKRIEEGIKELGSQILKEHPVENTQLQNEKLYLYYLQNGRDMYVDQELDINRLSDYDVDHIVPQSFIKDDSIDNKVLTRSDKNRGKSDNVPSEEVVKKMKNYWRQLLNAKLITQRKFDNLTKAERGGLSELDKAGFIKRQLVETRQITKHVAQILDSRMNTKYDENDKLIREVKVITLKSKLVSDFRKDFQFYKVREINNYHHAHDAYLNAVVGTALIKKYPKLESEFVYGDYKVYDVRKMIAKSEQEIGKATAKYFFYSNIMNFFKTEITLANGEIRKRPLIETNGETGEIVWDKGRDFATVRKVLSMPQVNIVKKTEVQTGGFSKESILPKRNSDKLIARKKDWDPKKYGGFDSPTVAYSVLVVAKVEKGKSKKLKSVKELLGITIMERSSFEKNPIDFLEAKGYKEVKKDLIIKLPKYSLFELENGRKRMLASAGELQKGNELALPSKYVNFLYLASHYEKLKGSPEDNEQKQLFVEQHKHYLDEIIEQISEFSKRVILADANLDKVLSAYNKHRDKPIREQAENIIHLFTLTNLGAPAAFKYFDTTIDRKRYTSTKEVLDATLIHQSITGLYETRIDLSQLGGD

SEQ ID NO: 21 - DNA, 4104 bp, Streptococcus pyogenes
atggataagaaatactcaataggcttagatatcggcacaaatagcgtcggatgggcggtgatcactgatgattataaggttccgtctaaaaagttcaaggttctgggaaatacagaccgccacagtatcaaaaaaaatcttataggggctcttttatttggcagtggagagacagcggaagcgactcgtctcaaacggacagctcgtagaaggtatacacgtcggaagaatcgtatttgttatctacaggagattttttcaaatgagatggcgaaagtagatgatagtttctttcatcgacttgaagagtcttttttggtggaagaagacaagaagcatgaacgtcatcctatttttggaaatatagtagatgaagttgcttatcatgagaaatatccaactatctatcatctgcgaaaaaaattggcagattctactgataaagcggatttgcgcttaatctatttggccttagcgcatatgattaagtttcgtggtcattttttgattgagggagatttaaatcctgataatagtgatgtggacaaactatttatccagttggtacaaatctacaatcaattatttgaagaaaaccctattaacgcaagtagagtagatgctaaagcgattctttctgcacgattgagtaaatcaagacgattagaaaatctcattgctcagctccccggtgagaagagaaatggcttgtttgggaatctcattgctttgtcattgggattgacccctaattttaaatcaaattttgatttggcagaagatgctaaattacagctttcaaaagatacttacgatgatgatttagataatttattggcgcaaattggagatcaatatgctgatttgtttttggcagctaagaatttatcagatgctattttactttcagatatcctaagagtaaatagtgaaataactaaggctcccctatcagcttcaatgattaagcgctacgatgaacatcatcaagacttgactcttttaaaagctttagttcgacaacaacttccagaaaagtataaagaaatcttttttgatcaatcaaaaaacggatatgcaggttatattgatgggggagctagccaagaagaattttataaatttatcaaaccaattttagaaaaaatggatggtactgaggaattattggtgaaactaaatcgtgaagatttgctgcgcaagcaacggacctttgacaacggctctattccccatcaaattcacttgggtgagctgcatgctattttgagaagacaagaagacttttatccatttttaaaagacaatcgtgagaagattgaaaaaatcttgacttttcgaattccttattatgttggtccattggcgcgtggcaatagtcgttttgcatggatgactcggaagtctgaagaaacaattaccccatggaattttgaagaagttgtcgataaaggtgcttcagctcaatcatttattgaacgcatgacaaactttgataaaaatcttccaaatgaaaaagtactaccaaaacatagtttgctttatgagtattttacggtttataacgaattgacaaaggtcaaatatgttactgagggaatgcgaaaaccagcatttctttcaggtgaacagaagaaagccattgttgatttactcttcaaaacaaatcgaaaagtaaccgttaagcaattaaaagaagattatttcaaaaaaatagaatgttttgatagtgttgaaatttcaggagttgaagatagatttaatgcttcattaggcgcctaccatgatttgctaaaaattattaaagataaagattttttggataatgaagaaaatgaagatatcttagaggatattgttttaacattgaccttatttgaagatagggggatgattgaggaaagacttaaaacatatgctcacctctttgatgataaggtgatgaaacagcttaaacgtcgccgttatactggttggggacgtttgtctcgaaaattgattaatggtattagggataagcaatctggcaaaacaatattagattttttgaaatcagatggttttgccaatcgcaattttatgcagctgatccatgatgatagtttgacatttaaagaagatattcaaaaagcacaggtgtctggacaaggccatagtttacatgaacagattgctaacttagctggcagtcctgctattaaaaaaggtattttacagactgtaaaaattgttgatgaactggtcaaagtaatggggcataagccagaaaatatcgttattgaaatggcacgtgaaaatcagacaactcaaaagggccagaaaaattcgcgagagcgtatgaaacgaatcgaagaaggtatcaaagaattaggaagtcagattcttaaagagcatcctgttgaaaatactcaattgcaaaatgaaaagctctatctctattatctacaaaatggaagagacatgtatgtggaccaagaattagatattaatcgtttaagtgattatgatgtcgatcacattgttccacaaagtttcattaaagacgattcaatagacaataaggtactaacgcgttctgataaaaatcgtggtaaatcggataacgttccaagtgaagaagtagtcaaaaagatgaaaaactattggagacaacttctaaacgccaagttaatcactcaacgtaagtttgataatttaacgaaagctgaacgtggaggtttgagtgaacttgataaagctggttttatcaaacgccaattggttgaaactcgccaaatcactaagcatgtggcacaaattttggatagtcgcatgaatactaaatacgatgaaaatgataaacttattcgagaggttaaagtgattaccttaaaatctaaattagtttctgacttccgaaaagatttccaattctataaagtacgtgagattaacaattaccatcatgcccatgatgcgtatctaaatgccgtcgttggaactgctttgattaagaaatatccaaaacttgaatcggagtttgtctatggtgattataaagtttatgatgttcgtaaaatgattgctaagtctgagcaagaaataggcaaagcaaccgcaaaatatttcttttactctaatatcatgaacttcttcaaaacagaaattacacttgcaaatggagagattcgcaaacgccctctaatcgaaactaatggggaaactggagaaattgtctgggataaagggcgagattttgccacagtgcgcaaagtattgtccatgccccaagtcaatattgtcaagaaaacagaagtacagacaggcggattctccaaggagtcaattttaccaaaaagaaattcggacaagcttattgctcgtaaaaaagactgggatccaaaaaaatatggtggttttgatagtccaacggtagcttattcagtcctagtggttgctaaggtggaaaaagggaaatcgaagaagttaaaatccgttaaagagttactagggatcacaattatggaaagaagttcctttgaaaaaaatccgattgactttttagaagctaaaggatataaggaagttaaaaaagacttaatcattaaactacctaaatatagtctttttgagttagaaaacggtcgtaaacggatgctggctagtgccggagaattacaaaaaggaaatgagctggctctgccaagcaaatatgtgaattttttatatttagctagtcattatgaaaagttgaagggtagtccagaagataacgaacaaaaacaattgtttgtggagcagcataagcattatttagatgagattattgagcaaatcagtgaattttctaagcgtgttattttagcagatgccaatttagataaagttcttagtgcatataacaaacatagagacaaaccaatacgtgaacaagcagaaaatattattcatttatttacgttgacgaatcttggagctcccgctgcttttaaatattttgatacaacaattgatcgtaaacgatatacgtctacaaaagaagttttagatgccactcttatccatcaatccatcactggtctttatgaaacacgcattgatttgagtcagctaggaggtgactga

SEQ ID NO: 22 - DNA, 4212 bp, Streptococcus pyogenes
atggataaaaagtattctattggtttagacatcggcactaattccgttggatgggctgtcataaccgatgaatacaaagtaccttcaaagaaatttaaggtgttggggaacacagaccgtcattcgattaaaaagaatcttatcggtgccctcctattcgatagtggcgaaacggcagaggcgactcgcctgaaacgaaccgctcggagaaggtatacacgtcgcaagaaccgaatatgttacttacaagaaatttttagcaatgagatggccaaagttgacgattctttctttcaccgtttggaagagtccttccttgtcgaagaggacaagaaacatgaacggcaccccatctttggaaacatagtagatgaggtggcatatcatgaaaagtacccaacgatttatcacctcagaaaaaagctagttgactcaactgataaagcggacctgaggttaatctacttggctcttgcccatatgataaagttccgtgggcactttctcattgagggtgatctaaatccggacaactcggatgtcgacaaactgttcatccagttagtacaaacctataatcagttgtttgaagagaaccctataaatgcaagtggcgtggatgcgaaggctattcttagcgcccgcctctctaaatcccgacggctagaaaacctgatcgcacaattacccggagagaagaaaaatgggttgttcggtaaccttatagcgctctcactaggcctgacaccaaattttaagtcgaacttcgacttagctgaagatgccaaattgcagcttagtaaggacacgtacgatgacgatctcgacaatctactggcacaaattggagatcagtatgcggacttatttttggctgccaaaaaccttagcgatgcaatcctcctatctgacatactgagagttaatactgagattaccaaggcgccgttatccgcttcaatgatcaaaaggtacgatgaacatcaccaagacttgacacttctcaaggccctagtccgtcagcaactgcctgagaaatataaggaaatattctttgatcagtcgaaaaacgggtacgcaggttatattgacggcggagcgagtcaagaggaattctacaagtttatcaaacccatattagagaagatggatgggacggaagagttgcttgtaaaactcaatcgcgaagatctactgcgaaagcagcggactttcgacaacggtagcattccacatcaaatccacttaggcgaattgcatgctatacttagaaggcaggaggatttttatccgttcctcaaagacaatcgtgaaaagattgagaaaatcctaacctttcgcataccttactatgtgggacccctggcccgagggaactctcggttcgcatggatgacaagaaagtccgaagaaacgattactccatggaattttgaggaagttgtcgataaaggtgcgtcagctcaatcgttcatcgagaggatgaccaactttgacaagaatttaccgaacgaaaaagtattgcctaagcacagtttactttacgagtatttcacagtgtacaatgaactcacgaaagttaagtatgtcactgagggcatgcgtaaacccgcctttctaagcggagaacagaagaaagcaatagtagatctgttattcaagaccaaccgcaaagtgacagttaagcaattgaaagaggactactttaagaaaattgaatgcttcgattctgtcgagatctccggggtagaagatcgatttaatgcgtcacttggtacgtatcatgacctcctaaagataattaaagataaggacttcctggataacgaagagaatgaagatatcttagaagatatagtgttgactcttaccctctttgaagatcgggaaatgattgaggaaagactaaaaacatacgctcacctgttcgacgataaggttatgaaacagttaaagaggcgtcgctatacgggctggggacgattgtcgcggaaacttatcaacgggataagagacaagcaaagtggtaaaactattctcgattttctaaagagcgacggcttcgccaataggaactttatgcagctgatccatgatgactctttaaccttcaaagaggatatacaaaaggcacaggtttccggacaaggggactcattgcacgaacatattgcgaatcttgctggttcgccagccatcaaaaagggcatactccagacagtcaaagtagtggatgagctagttaaggtcatgggacgtcacaaaccggaaaacattgtaatcgagatggcacgcgaaaatcaaacgactcagaaggggcaaaaaaacagtcgagagcggatgaagagaatagaagagggtattaaagaactgggcagccagatcttaaaggagcatcctgtggaaaatacccaattgcagaacgagaaactttacctctattacctacaaaatggaagggacatgtatgttgatcaggaactggacataaaccgtttatctgattacgacgtcgatcacattgtaccccaatcctttttgaaggacgattcaatcgacaataaagtgcttacacgctcggataagaaccgagggaaaagtgacaatgttccaagcgaggaagtcgtaaagaaaatgaagaactattggcggcagctcctaaatgcgaaactgataacgcaaagaaagttcgataacttaactaaagctgagaggggtggcttgtctgaacttgacaaggccggatttattaaacgtcagctcgtggaaacccgccaaatcacaaagcatgttgcacagatactagattcccgaatgaatacgaaatacgacgagaacgataagctgattcgggaagtcaaagtaatcactttaaagtcaaaattggtgtcggacttcagaaaggattttcaattctataaagttagggagataaataactaccaccatgcgcacgacgcttatcttaatgccgtcgtagggaccgcactcattaagaaatacccgaagctagaaagtgagtttgtgtatggtgattacaaagtttatgacgtccgtaagatgatcgcgaaaagcgaacaggagataggcaaggctacagccaaatacttcttttattctaacattatgaatttctttaagacggaaatcactctggcaaacggagagatacgcaaacgacctttaattgaaaccaatggggagacaggtgaaatcgtatgggataagggccgggacttcgcgacggtgagaaaagttttgtccatgccccaagtcaacatagtaaagaaaactgaggtgcagaccggagggttttcaaaggaatcgattcttccaaaaaggaatagtgataagctcatcgctcgtaaaaaggactgggacccgaaaaagtacggtggcttcgatagccctacagttgcctattctgtcctagtagtggcaaaagttgagaagggaaaatccaagaaactgaagtcagtcaaagaattattggggataacgattatggagcgctcgtcttttgaaaagaaccccatcgacttccttgaggcgaaaggttacaaggaagtaaaaaaggatctcataattaaactaccaaagtatagtctgtttgagttagaaaatggccgaaaacggatgttggctagcgccggagagcttcaaaaggggaacgaactcgcactaccgtctaaatacgtgaatttcctgtatttagcgtcccattacgagaagttgaaaggttcacctgaagataacgaacagaagcaactttttgttgagcagcacaaacattatctcgacgaaatcatagagcaaatttcggaattcagtaagagagtcatcctagctgatgccaatctggacaaagtattaagcgcatacaacaagcacagggataaacccatacgtgagcaggcggaaaatattatccatttgtttactcttaccaacctcggcgctccagccgcattcaagtattttgacacaacgatagatcgcaaacgatacacttctaccaaggaggtgctagacgcgacactgattcaccaatccatcacgggattatatgaaactcggatagatttgtcacagcttgggggtgacggatcccccaagaagaagaggaaagtctcgagcgactacaaagaccatgacggtgattataaagatcatgacatcgattacaaggatgacgatgacaaggctgcagga

SEQ ID NO: 23 - protein, 1368 aa, Streptococcus pyogenes
MDKKYSIGLAIGTNSVGWAVITDEYKVPSKKFKVLGNTDRHSIKKNLIGALLFDSGETAEATRLKRTARRRYTRRKNRICYLQEIFSNEMAKVDDSFFHRLEESFLVEEDKKHERHPIFGNIVDEVAYHEKYPTIYHLRKKLVDSTDKADLRLIYLALAHMIKFRGHFLIEGDLNPDNSDVDKLFIQLVQTYNQLFEENPINASGVDAKAILSARLSKSRRLENLIAQLPGEKKNGLFGNLIALSLGLTPNFKSNFDLAEDAKLQLSKDTYDDDLDNLLAQIGDQYADLFLAAKNLSDAILLSDILRVNTEITKAPLSASMIKRYDEHHQDLTLLKALVRQQLPEKYKEIFFDQSKNGYAGYIDGGASQEEFYKFIKPILEKMDGTEELLVKLNREDLLRKQRTFDNGSIPHQIHLGELHAILRRQEDFYPFLKDNREKIEKILTFRIPYYVGPLARGNSRFAWMTRKSEETITPWNFEEVVDKGASAQSFIERMTNFDKNLPNEKVLPKHSLLYEYFTVYNELTKVKYVTEGMRKPAFLSGEQKKAIVDLLFKTNRKVTVKQLKEDYFKKIECFDSVEISGVEDRFNASLGTYHDLLKIIKDKDFLDNEENEDILEDIVLTLTLFEDREMIEERLKTYAHLFDDKVMKQLKRRRYTGWGRLSRKLINGIRDKQSGKTILDFLKSDGFANRNFMQLIHDDSLTFKEDIQKAQVSGQGDSLHEHIANLAGSPAIKKGILQTVKVVDELVKVMGRHKPENIVIEMARENQTTQKGQKNSRERMKRIEEGIKELGSQILKEHPVENTQLQNEKLYLYYLQNGRDMYVDQELDINRLSDYDVDHIVPQSFLKDDSIDNKVLTRSDKNRGKSDNVPSEEVVKKMKNYWRQLLNAKLITQRKFDNLTKAERGGLSELDKAGFIKRQLVETRQITKHVAQILDSRMNTKYDENDKLIREVKVITLKSKLVSDFRKDFQFYKVREINNYHHAHDAYLNAVVGTALIKKYPKLESEFVYGDYKVYDVRKMIAKSEQEIGKATAKYFFYSNIMNFFKTEITLANGEIRKRPLIETNGETGEIVWDKGRDFATVRKVLSMPQVNIVKKTEVQTGGFSKESILPKRNSDKLIARKKDWDPKKYGGFDSPTVAYSVLVVAKVEKGKSKKLKSVKELLGITIMERSSFEKNPIDFLEAKGYKEVKKDLIIKLPKYSLFELENGRKRMLASAGELQKGNELALPSKYVNFLYLASHYEKLKGSPEDNEQKQLFVEQHKHYLDEIIEQISEFSKRVILADANLDKVLSAYNKHRDKPIREQAENIIHLFTLTNLGAPAAFKYFDTTIDRKRYTSTKEVLDATLIHQSITGLYETRIDLSQLGGD

SEQ ID NO: 24 - DNA, 4107 bp, Streptococcus pyogenes
atggataagaaatactcaataggcttagatatcggcacaaatagcgtcggatgggcggtgatcactgatgaatataaggttccgtctaaaaagttcaaggttctgggaaatacagaccgccacagtatcaaaaaaaatcttataggggctcttttatttgacagtggagagacagcggaagcgactcgtctcaaacggacagctcgtagaaggtatacacgtcggaagaatcgtatttgttatctacaggagattttttcaaatgagatggcgaaagtagatgatagtttctttcatcgacttgaagagtcttttttggtggaagaagacaagaagcatgaacgtcatcctatttttggaaatatagtagatgaagttgcttatcatgagaaatatccaactatctatcatctgcgaaaaaaattggtagattctactgataaagcggatttgcgcttaatctatttggccttagcgcatatgattaagtttcgtggtcattttttgattgagggagatttaaatcctgataatagtgatgtggacaaactatttatccagttggtacaaacctacaatcaattatttgaagaaaaccctattaacgcaagtggagtagatgctaaagcgattctttctgcacgattgagtaaatcaagacgattagaaaatctcattgctcagctccccggtgagaagaaaaatggcttatttgggaatctcattgctttgtcattgggtttgacccctaattttaaatcaaattttgatttggcagaagatgctaaattacagctttcaaaagatacttacgatgatgatttagataatttattggcgcaaattggagatcaatatgctgatttgtttttggcagctaagaatttatcagatgctattttactttcagatatcctaagagtaaatactgaaataactaaggctcccctatcagcttcaatgattaaacgctacgatgaacatcatcaagacttgactcttttaaaagctttagttcgacaacaacttccagaaaagtataaagaaatcttttttgatcaatcaaaaaacggatatgcaggttatattgatgggggagctagccaagaagaattttataaatttatcaaaccaattttagaaaaaatggatggtactgaggaattattggtgaaactaaatcgtgaagatttgctgcgcaagcaacggacctttgacaacggctctattccccatcaaattcacttgggtgagctgcatgctattttgagaagacaagaagacttttatccatttttaaaagacaatcgtgagaagattgaaaaaatcttgacttttcgaattccttattatgttggtccattggcgcgtggcaatagtcgttttgcatggatgactcggaagtctgaagaaacaattaccccatggaattttgaagaagttgtcgataaaggtgcttcagctcaatcatttattgaacgcatgacaaactttgataaaaatcttccaaatgaaaaagtactaccaaaacatagtttgctttatgagtattttacggtttataacgaattgacaaaggtcaaatatgttactgaaggaatgcgaaaaccagcatttctttcaggtgaacagaagaaagccattgttgatttactcttcaaaacaaatcgaaaagtaaccgttaagcaattaaaagaagattatttcaaaaaaatagaatgttttgatagtgttgaaatttcaggagttgaagatagatttaatgcttcattaggtacctaccatgatttgctaaaaattattaaagataaagattttttggataatgaagaaaatgaagatatcttagaggatattgttttaacattgaccttatttgaagatagggagatgattgaggaaagacttaaaacatatgctcacctctttgatgataaggtgatgaaacagcttaaacgtcgccgttatactggttggggacgtttgtctcgaaaattgattaatggtattagggataagcaatctggcaaaacaatattagattttttgaaatcagatggttttgccaatcgcaattttatgcagctgatccatgatgatagtttgacatttaaagaagacattcaaaaagcacaagtgtctggacaaggcgatagtttacatgaacatattgcaaatttagctggtagccctgctattaaaaaaggtattttacagactgtaaaagttgttgatgaattggtcaaagtaatggggcggcataagccagaaaatatcgttattgaaatggcacgtgaaaatcagacaactcaaaagggccagaaaaattcgcgagagcgtatgaaacgaatcgaagaaggtatcaaagaattaggaagtcagattcttaaagagcatcctgttgaaaatactcaattgcaaaatgaaaagctctatctctattatctccaaaatggaagagacatgtatgtggaccaagaattagatattaatcgtttaagtgattatgatgtcgatcacattgttccacaaagtttccttaaagacgattcaatagacaataaggtcttaacgcgttctgataaaaatcgtggtaaatcggataacgttccaagtgaagaagtagtcaaaaagatgaaaaactattggagacaacttctaaacgccaagttaatcactcaacgtaagtttgataatttaacgaaagctgaacgtggaggtttgagtgaacttgataaagctggttttatcaaacgccaattggttgaaactcgccaaatcactaagcatgtggcacaaattttggatagtcgcatgaatactaaatacgatgaaaatgataaacttattcgagaggttaaagtgattaccttaaaatctaaattagtttctgacttccgaaaagatttccaattctataaagtacgtgagattaacaattaccatcatgcccatgatgcgtatctaaatgccgtcgttggaactgctttgattaagaaatatccaaaacttgaatcggagtttgtctatggtgattataaagtttatgatgttcgtaaaatgattgctaagtctgagcaagaaataggcaaagcaaccgcaaaatatttcttttactctaatatcatgaacttcttcaaaacagaaattacacttgcaaatggagagattcgcaaacgccctctaatcgaaactaatggggaaactggagaaattgtctgggataaagggcgagattttgccacagtgcgcaaagtattgtccatgccccaagtcaatattgtcaagaaaacagaagtacagacaggcggattctccaaggagtcaattttaccaaaaagaaattcggacaagcttattgctcgtaaaaaagactgggatccaaaaaaatatggtggttttgatagtccaacggtagcttattcagtcctagtggttgctaaggtggaaaaagggaaatcgaagaagttaaaatccgttaaagagttactagggatcacaattatggaaagaagttcctttgaaaaaaatccgattgactttttagaagctaaaggatataaggaagttaaaaaagacttaatcattaaactacctaaatatagtctttttgagttagaaaacggtcgtaaacggatgctggctagtgccggagaattacaaaaaggaaatgagctggctctgccaagcaaatatgtgaattttttatatttagctagtcattatgaaaagttgaagggtagtccagaagataacgaacaaaaacaattgtttgtggagcagcataagcattatttagatgagattattgagcaaatcagtgaattttctaagcgtgttattttagcagatgccaatttagataaagttcttagtgcatataacaaacatagagacaaaccaatacgtgaacaagcagaaaatattattcatttatttacgttgacgaatcttggagctcccgctgcttttaaatattttgatacaacaattgatcgtaaacgatatacgtctacaaaagaagttttagatgccactcttatccatcaatccatcactggtctttatgaaacacgcattgatttgagtcagctaggaggtgactga

SEQ ID NO: 25 - protein, 1082 aa, Neisseria meningitidis
MAAFKPNPINYILGLDIGIASVGWAMVEIDEDENPICLIDLGVRVFERAEVPKTGDSLAMARRLARSVRRLTRRRAHRLLRARRLLKREGVLQAADFDENGLIKSLPNTPWQLRAAALDRKLTPLEWSAVLLHLIKHRGYLSQRKNEGETADKELGALLKGVADNAHALQTGDFRTPAELALNKFEKESGHIRNQRGDYSHTFSRKDLQAELILLFEKQKEFGNPHVSGGLKEGIETLLMTQRPALSGDAVQKMLGHCTFEPAEPKAAKNTYTAERFIWLTKLNNLRILEQGSERPLTDTERATLMDEPYRKSKLTYAQARKLLGLEDTAFFKGLRYGKDNAEASTLMEMKAYHAISRALEKEGLKDKKSPLNLSPELQDEIGTAFSLFKTDEDITGRLKDRIQPEILEALLKHISFDKFVQISLKALRRIVPLMEQGKRYDEACAEIYGDHYGKKNTEEKIYLPPIPADEIRNPVVLRALSQARKVINGVVRRYGSPARIHIETAREVGKSFKDRKEIEKRQEENRKDREKAAAKFREYFPNFVGEPKSKDILKLRLYEQQHGKCLYSGKEINLGRLNEKGYVEIDHALPFSRTWDDSFNNKVLVLGSENQNKGNQTPYEYFNGKDNSREWQEFKARVETSRFPRSKKQRILLQKFDEDGFKERNLNDTRYVNRFLCQFVADRMRLTGKGKKRVFASNGQITNLLRGFWGLRKVRAENDRHHALDAVVVACSTVAMQQKITRFVRYKEMNAFDGKTIDKETGEVLHQKTHFPQPWEFFAQEVMIRVFGKPDGKPEFEEADTPEKLRTLLAEKLSSRPEAVHEYVTPLFVSRAPNRKMSGQGHMETVKSAKRLDEGVSVLRVPLTQLKLKDLEKMVNREREPKLYEALKARLEAHKDDPAKAFAEPFYKYDKAGNRTQQVKAVRVEQVQKTGVWVRNHNGIADNATMVRVDVFEKGDKYYLVPIYSWQVAKGILPDRAVVQGKDEEDWQLIDDSFNFKFSLHPNDLVEVITKKARMFGYFASCHRGTGNINIRIHDLDHKIGKNGILEGIGVKTALSFQKYQIDELGKEIRPCRLKKRPPVR

SEQ ID NO: 26 - protein, 1082 aa, Neisseria meningitidis
MAAFKPNPINYILGLDIGIASVGWAMVEIDEEENPIRLIDLGVRVFERAEVPKTGDSLAMARRLARSVRRLTRRRAHRLLRARRLLKREGVLQAADFDENGLIKSLPNTPWQLRAAALDRKLTPLEWSAVLLHLIKHRGYLSQRKNEGETADKELGALLKGVANNAHALQTGDFRTPAELALNKFEKESGHIRNQRGDYSHTFSRKDLQAELILLFEKQKEFGNPHVSGGLKEGIETLLMTQRPALSGDAVQKMLGHCTFEPAEPKAAKNTYTAERFIWLTKLNNLRILEQGSERPLTDTERATLMDEPYRKSKLTYAQARKLLGLEDTAFFKGLRYGKDNAEASTLMEMKAYHAISRALEKEGLKDKKSPLNLSSELQDEIGTAFSLFKTDEDITGRLKDRVQPEILEALLKHISFDKFVQISLKALRRIVPLMEQGKRYDEACAEIYGDHYGKKNTEEKIYLPPIPADEIRNPVVLRALSQARKVINGVVRRYGSPARIHIETAREVGKSFKDRKEIEKRQEENRKDREKAAAKFREYFPNFVGEPKSKDILKLRLYEQQHGKCLYSGKEINLVRLNEKGYVEIDHALPFSRTWDDSFNNKVLVLGSENQNKGNQTPYEYFNGKDNSREWQEFKARVETSRFPRSKKQRILLQKFDEDGFKECNLNDTRYVNRFLCQFVADHILLTGKGKRRVFASNGQITNLLRGFWGLRKVRAENDRHHALDAVVVACSTVAMQQKITRFVRYKEMNAFDGKTIDKETGKVLHQKTHFPQPWEFFAQEVMIRVFGKPDGKPEFEEADTPEKLRTLLAEKLSSRPEAVHEYVTPLFVSRAPNRKMSGAHKDTLRSAKRFVKHNEKISVKRVWLTEIKLADLENMVNYKNGREIELYEALKARLEAYGGNAKQAFDPKDNPFYKKGGQLVKAVRVEKTQESGVLLNKKNAYTIADNGDMVRVDVFCKVDKKGKNQYFIVPIYAWQVAENILPDIDCKGYRIDDSYTFCFSLHKYDLIAFQKDEKSKVEFAYYINCDSSNGRFYLAWHDKGSKEQQFRISTQNLVLIQKYQVNELGKEIRPCRLKKRPPVR

SEQ ID NO: 27 - protein, 1368 aa, Artificial Sequence
  Description of Artificial Sequence: Synthetic polypeptide
MDKKYSIGLAIGTNSVGWAVITDEYKVPSKKFKVLGNTDRHSIKKNLIGALLFDSGETAEATRLKRTARRRYTRRKNRICYLQEIFSNEMAKVDDSFFHRLEESFLVEEDKKHERHPIFGNIVDEVAYHEKYPTIYHLRKKLVDSTDKADLRLIYLALAHMIKFRGHFLIEGDLNPDNSDVDKLFIQLVQTYNQLFEENPINASGVDAKAILSARLSKSRRLENLIAQLPGEKKNGLFGNLIALSLGLTPNFKSNFDLAEDAKLQLSKDTYDDDLDNLLAQIGDQYADLFLAAKNLSDAILLSDILRVNTEITKAPLSASMIKRYDEHHQDLTLLKALVRQQLPEKYKEIFFDQSKNGYAGYIDGGASQEEFYKFIKPILEKMDGTEELLVKLNREDLLRKQRTFDNGSIPHQIHLGELHAILRRQEDFYPFLKDNREKIEKILTFRIPYYVGPLARGNSRFAWMTRKSEETITPWNFEEVVDKGASAQSFIERMTNFDKNLPNEKVLPKHSLLYEYFTVYNELTKVKYVTEGMRKPAFLSGEQKKAIVDLLFKTNRKVTVKQLKEDYFKKIECFDSVEISGVEDRFNASLGTYHDLLKIIKDKDFLDNEENEDILEDIVLTLTLFEDREMIEERLKTYAHLFDDKVMKQLKRRRYTGWGRLSRKLINGIRDKQSGKTILDFLKSDGFANRNFMQLIHDDSLTFKEDIQKAQVSGQGDSLHEHIANLAGSPAIKKGILQTVKVVDELVKVMGRHKPENIVIEMARENQTTQKGQKNSRERMKRIEEGIKELGSQILKEHPVENTQLQNEKLYLYYLQNGRDMYVDQELDINRLSDYDVDAIVPQSFLKDDSIDNKVLTRSDKNRGKSDNVPSEEVVKKMKNYWRQLLNAKLITQRKFDNLTKAERGGLSELDKAGFIKRQLVETRQITKHVAQILDSRMNTKYDENDKLIREVKVITLKSKLVSDFRKDFQFYKVREINNYHHAHDAYLNAVVGTALIKKYPKLESEFVYGDYKVYDVRKMIAKSEQEIGKATAKYFFYSNIMNFFKTEITLANGEIRKRPLIETNGETGEIVWDKGRDFATVRKVLSMPQVNIVKKTEVQTGGFSKESILPKRNSDKLIARKKDWDPKKYGGFDSPTVAYSVLVVAKVEKGKSKKLKSVKELLGITIMERSSFEKNPIDFLEAKGYKEVKKDLIIKLPKYSLFELENGRKRMLASAGELQKGNELALPSKYVNFLYLASHYEKLKGSPEDNEQKQLFVEQHKHYLDEIIEQISEFSKRVILADANLDKVLSAYNKHRDKPIREQAENIIHLFTLTNLGAPAAFKYFDTTIDRKRYTSTKEVLDATLIHQSITGLYETRIDLSQLGGD

SEQ ID NO: 28 - protein, 1367 aa, Artificial Sequence
  Description of Artificial Sequence: Synthetic polypeptide
DKKYSIGLAIGTNSVGWAVITDEYKVPSKKFKVLGNTDRHSIKKNLIGALLFDSGETAEATRLKRTARRRYTRRKNRICYLQEIFSNEMAKVDDSFFHRLEESFLVEEDKKHERHPIFGNIVDEVAYHEKYPTIYHLRKKLVDSTDKADLRLIYLALAHMIKFRGHFLIEGDLNPDNSDVDKLFIQLVQTYNQLFEENPINASGVDAKAILSARLSKSRRLENLIAQLPGEKKNGLFGNLIALSLGLTPNFKSNFDLAEDAKLQLSKDTYDDDLDNLLAQIGDQYADLFLAAKNLSDAILLSDILRVNTEITKAPLSASMIKRYDEHHQDLTLLKALVRQQLPEKYKEIFFDQSKNGYAGYIDGGASQEEFYKFIKPILEKMDGTEELLVKLNREDLLRKQRTFDNGSIPHQIHLGELHAILRRQEDFYPFLKDNREKIEKILTFRIPYYVGPLARGNSRFAWMTRKSEETITPWNFEEVVDKGASAQSFIERMTNFDKNLPNEKVLPKHSLLYEYFTVYNELTKVKYVTEGMRKPAFLSGEQKKAIVDLLFKTNRKVTVKQLKEDYFKKIECFDSVEISGVEDRFNASLGTYHDLLKIIKDKDFLDNEENEDILEDIVLTLTLFEDREMIEERLKTYAHLFDDKVMKQLKRRRYTGWGRLSRKLINGIRDKQSGKTILDFLKSDGFANRNFMQLIHDDSLTFKEDIQKAQVSGQGDSLHEHIANLAGSPAIKKGILQTVKVVDELVKVMGRHKPENIVIEMARENQTTQKGQKNSRERMKRIEEGIKELGSQILKEHPVENTQLQNEKLYLYYLQNGRDMYVDQELDINRLSDYDVDAIVPQSFLKDDSIDNKVLTRSDKNRGKSDNVPSEEVVKKMKNYWRQLLNAKLITQRKFDNLTKAERGGLSELDKAGFIKRQLVETRQITKHVAQILDSRMNTKYDENDKLIREVKVITLKSKLVSDFRKDFQFYKVREINNYHHAHDAYLNAVVGTALIKKYPKLESEFVYGDYKVYDVRKMIAKSEQEIGKATAKYFFYSNIMNFFKTEITLANGEIRKRPLIETNGETGEIVWDKGRDFATVRKVLSMPQVNIVKKTEVQTGGFSKESILPKRNSDKLIARKKDWDPKKYGGFDSPTVAYSVLVVAKVEKGKSKKLKSVKELLGITIMERSSFEKNPIDFLEAKGYKEVKKDLIIKLPKYSLFELENGRKRMLASAGELQKGNELALPSKYVNFLYLASHYEKLKGSPEDNEQKQLFVEQHKHYLDEIIEQISEFSKRVILADANLDKVLSAYNKHRDKPIREQAENIIHLFTLTNLGAPAAFKYFDTTIDRKRYTSTKEVLDATLIHQSITGLYETRIDLSQLGGD

SEQ ID NO: 29 - protein, 1367 aa, Streptococcus pyogenes
DKKYSIGLAIGTNSVGWAVITDEYKVPSKKFKVLGNTDRHSIKKNLIGALLFDSGETAEATRLKRTARRRYTRRKNRICYLQEIFSNEMAKVDDSFFHRLEESFLVEEDKKHERHPIFGNIVDEVAYHEKYPTIYHLRKKLVDSTDKADLRLIYLALAHMIKFRGHFLIEGDLNPDNSDVDKLFIQLVQTYNQLFEENPINASGVDAKAILSARLSKSRRLENLIAQLPGEKKNGLFGNLIALSLGLTPNFKSNFDLAEDAKLQLSKDTYDDDLDNLLAQIGDQYADLFLAAKNLSDAILLSDILRVNTEITKAPLSASMIKRYDEHHQDLTLLKALVRQQLPEKYKEIFFDQSKNGYAGYIDGGASQEEFYKFIKPILEKMDGTEELLVKLNREDLLRKQRTFDNGSIPHQIHLGELHAILRRQEDFYPFLKDNREKIEKILTFRIPYYVGPLARGNSRFAWMTRKSEETITPWNFEEVVDKGASAQSFIERMTNFDKNLPNEKVLPKHSLLYEYFTVYNELTKVKYVTEGMRKPAFLSGEQKKAIVDLLFKTNRKVTVKQLKEDYFKKIECFDSVEISGVEDRFNASLGTYHDLLKIIKDKDFLDNEENEDILEDIVLTLTLFEDREMIEERLKTYAHLFDDKVMKQLKRRRYTGWGRLSRKLINGIRDKQSGKTILDFLKSDGFANRNFMQLIHDDSLTFKEDIQKAQVSGQGDSLHEHIANLAGSPAIKKGILQTVKVVDELVKVMGRHKPENIVIEMARENQTTQKGQKNSRERMKRIEEGIKELGSQILKEHPVENTQLQNEKLYLYYLQNGRDMYVDQELDINRLSDYDVDHIVPQSFLKDDSIDNKVLTRSDKNRGKSDNVPSEEVVKKMKNYWRQLLNAKLITQRKFDNLTKAERGGLSELDKAGFIKRQLVETRQITKHVAQILDSRMNTKYDENDKLIREVKVITLKSKLVSDFRKDFQFYKVREINNYHHAHDAYLNAVVGTALIKKYPKLESEFVYGDYKVYDVRKMIAKSEQEIGKATAKYFFYSNIMNFFKTEITLANGEIRKRPLIETNGETGEIVWDKGRDFATVRKVLSMPQVNIVKKTEVQTGGFSKESILPKRNSDKLIARKKDWDPKKYGGFDSPTVAYSVLVVAKVEKGKSKKLKSVKELLGITIMERSSFEKNPIDFLEAKGYKEVKKDLIIKLPKYSLFELENGRKRMLASAGELQKGNELALPSKYVNFLYLASHYEKLKGSPEDNEQKQLFVEQHKHYLDEIIEQISEFSKRVILADANLDKVLSAYNKHRDKPIREQAENIIHLFTLTNLGAPAAFKYFDTTIDRKRYTSTKEVLDATLIHQSITGLYETRIDLSQLGGD

SEQ ID NO: 30 - protein, 1367 aa, Artificial Sequence
  Description of Artificial Sequence: Synthetic polypeptide
DKKYSIGLDIGTNSVGWAVITDEYKVPSKKFKVLGNTDRHSIKKNLIGALLFDSGETAEATRLKRTARRRYTRRKNRICYLQEIFSNEMAKVDDSFFHRLEESFLVEEDKKHERHPIFGNIVDEVAYHEKYPTIYHLRKKLVDSTDKADLRLIYLALAHMIKFRGHFLIEGDLNPDNSDVDKLFIQLVQTYNQLFEENPINASGVDAKAILSARLSKSRRLENLIAQLPGEKKNGLFGNLIALSLGLTPNFKSNFDLAEDAKLQLSKDTYDDDLDNLLAQIGDQYADLFLAAKNLSDAILLSDILRVNTEITKAPLSASMIKRYDEHHQDLTLLKALVRQQLPEKYKEIFFDQSKNGYAGYIDGGASQEEFYKFIKPILEKMDGTEELLVKLNREDLLRKQRTFDNGSIPHQIHLGELHAILRRQEDFYPFLKDNREKIEKILTFRIPYYVGPLARGNSRFAWMTRKSEETITPWNFEEVVDKGASAQSFIERMTNFDKNLPNEKVLPKHSLLYEYFTVYNELTKVKYVTEGMRKPAFLSGEQKKAIVDLLFKTNRKVTVKQLKEDYFKKIECFDSVEISGVEDRFNASLGTYHDLLKIIKDKDFLDNEENEDILEDIVLTLTLFEDREMIEERLKTYAHLFDDKVMKQLKRRRYTGWGRLSRKLINGIRDKQSGKTILDFLKSDGFANRNFMQLIHDDSLTFKEDIQKAQVSGQGDSLHEHIANLAGSPAIKKGILQTVKVVDELVKVMGRHKPENIVIEMARENQTTQKGQKNSRERMKRIEEGIKELGSQILKEHPVENTQLQNEKLYLYYLQNGRDMYVDQELDINRLSDYDVDHIVPQSFLKDDSIDNKVLTRSDKNRGKSDNVPSEEVVKKMKNYWRQLLNAKLITQRKFDNLTKAERGGLSELDKAGFIKRQLVETRQITKHVAQILDSRMNTKYDENDKLIREVKVITLKSKLVSDFRKDFQFYKVREINNYHHAHDAYLNAVVGTALIKKYPKLESEFVYGDYKVYDVRKMIAKSEQEIGKATAKYFFYSNIMNFFKTEITLANGEIRKRPLIETNGETGEIVWDKGRDFATVRKVLSMPQVNIVKKTEVQTGGFSKESILPKRNSDKLIARKKDWDPKKYGGFDSPTVAYSVLVVAKVEKGKSKKLKSVKELLGITIMERSSFEKNPIDFLEAKGYKEVKKDLIIKLPKYSLFELENGRKRMLASAGELQKGNELALPSKYVNFLYLASHYEKLKGSPEDNEQKQLFVEQHKHYLDEIIEQISEFSKRVILADANLDKVLSAYNKHRDKPIREQAENIIHLFTLTNLGAPAAFKYFDTTIDRKRYTSTKEVLDATLIHQSITGLYETRIDLSQLGGD

SEQ ID NO: 31 - protein, 1129 aa, Alicyclobacillus acidoterrestris
MAVKSIKVKLRLDDMPEIRAGLWKLHKEVNAGVRYYTEWLSLLRQENLYRRSPNGDGEQECDKTAEECKAELLERLRARQVENGHRGPAGSDDELLQLARQLYELLVPQAIGAKGDAQQIARKFLSPLADKDAVGGLGIAKAGNKPRWVRMREAGEPGWEEEKEKAETRKSADRTADVLRALADFGLKPLMRVYTDSEMSSVEWKPLRKGQAVRTWDRDMFQQAIERMMSWESWNQRVGQEYAKLVEQKNRFEQKNFVGQEHLVHLVNQLQQDMKEASPGLESKEQTAHYVTGRALRGSDKVFEKWGKLAPDAPFDLYDAEIKNVQRRNTRRFGSHDLFAKLAEPEYQALWREDASFLTRYAVYNSILRKLNHAKMFATFTLPDATAHPIWTRFDKLGGNLHQYTFLFNEFGERRHAIRFHKLLKVENGVAREVDDVTVPISMSEQLDNLLPRDPNEPIALYFRDYGAEQHFTGEFGGAKIQCRRDQLAHMHRRRGARDVYLNVSVRVQSQSEARGERRPPYAAVFRLVGDNHRAFVHFDKLSDYLAEHPDDGKLGSEGLLSGLRVMSVDLGLRTSASISVFRVARKDELKPNSKGRVPFFFPIKGNDNLVAVHERSQLLKLPGETESKDLRAIREERQRTLRQLRTQLAYLRLLVRCGSEDVGRRERSWAKLIEQPVDAANHMTPDWREAFENELQKLKSLHGICSDKEWMDAVYESVRRVWRHMGKQVRDWRKDVRSGERPKIRGYAKDVVGGNSIEQIEYLERQYKFLKSWSFFGKVSGQVIRAEKGSRFAITLREHIDHAKEDRLKKLADRIIMEALGYVYALDERGKGKWVAKYPPCQLILLEELSEYQFNNDRPPSENNQLMQWSHRGVFQELINQAQVHDLLVGTMYAAFSSRFDARTGAPGIRCRRVPARCTQEHNPEPFPWWLNKFVVEHTLDACPLRADDLIPTGEGEIFVSPFSAEEGDFHQIHADLNAAQNLQQRLWSDFDISQIRLRCDWGEVDGELVLIPRLTGKRTADSYSNKVFYTNTGVTYYERERGKKRRKVFAQEKLSEEEAELLVEADEAREKSVVLMRDPSGIINRGNWTRQKEFWSMVNQRIEGYLVKQIRSRVPLQDSACENTGDI

SEQ ID NO: 32 - protein, 345 aa, Sulfolobus islandicus
MEVPLYNIFGDNYIIQVATEAENSTIYNNKVEIDDEELRNVLNLAYKIAKNNEDAAAERRGKAKKKKGEEGETTTSNIILPLSGNDKNPWTETLKCYNFPTTVALSEVFKNFSQVKECEEVSAPSFVKPEFYEFGRSPGMVERTRRVKLEVEPHYLIIAAAGWVLTRLGKAKVSEGDYVGVNVFTPTRGILYSLIQNVNGIVPGIKPETAFGLWIARKVVSSVTNPNVSVVRIYTISDAVGQNPTTINGGFSIDLTKLLEKRYLLSERLEAIARNALSISSNMRERYIVLANYIYEYLTGSKRLEDLLYFANRDLIMNLNSDDGKVRDLKLISAYVNGELIRGEG

SEQ ID NO: 33 - protein, 345 aa, Sulfolobus islandicus
MEVPLYNIFGDNYIIQVATEAENSTIYNNKVEIDDEELRNVLNLAYKIAKNNEDAAAERRGKAKKKKGEEGETTTSNIILPLSGNDKNPWTETLKCYNFPTTVALSEVFKNFSQVKECEEVSAPSFVKPEFYKFGRSPGMVERTRRVKLEVEPHYLIMAAAGWVLTRLGKAKVSEGDYVGVNVFTPTRGILYSLIQNVNGIVPGIKPETAFGLWIARKVVSSVTNPNVSVVSIYTISDAVGQNPTTINGGFSIDLTKLLEKRDLLSERLEAIARNALSISSNMRERYIVLANYIYEYLTGSKRLEDLLYFANRDLIMNLNSDDGKVRDLKLISAYVNGELIRGEG

SEQ ID NO: 34 - protein, 986 aa, Unknown
  Description of Unknown: Deltaproteobacteria CasX sequence
MEKRINKIRKKLSADNATKPVSRSGPMKTLLVRVMTDDLKKRLEKRRKKPEVMPQVISNNAANNLRMLLDDYTKMKEAILQVYWQEFKDDHVGLMCKFAQPASKKIDQNKLKPEMDEKGNLTTAGFACSQCGQPLFVYKLEQVSEKGKAYTNYFGRCNVAEHEKLILLAQLKPVKDSDEAVTYSLGKFGQRALDFYSIHVTKESTHPVKPLAQIAGNRYASGPVGKALSDACMGTIASFLSKYQDIIIEHQKVVKGNQKRLESLRELAGKENLEYPSVTLPPQPHTKEGVDAYNEVIARVRMWVNLNLWQKLKLSRDDAKPLLRLKGFPSFPVVERRENEVDWWNTINEVKKLIDAKRDMGRVFWSGVTAEKRNTILEGYNYLPNENDHKKREGSLENPKKPAKRQFGDLLLYLEKKYAGDWGKVFDEAWERIDKKIAGLTSHIEREEARNAEDAQSKAVLTDWLRAKASFVLERLKEMDEKEFYACEIQLQKWYGDLRGNPFAVEAENRVVDISGFSIGSDGHSIQYRNLLAWKYLENGKREFYLLMNYGKKGRIRFTDGTDIKKSGKWQGLLYGGGKAKVIDLTFDPDDEQLIILPLAFGTRQGREFIWNDLLSLETGLIKLANGRVIEKTIYNKKIGRDEPALFVALTFERREVVDPSNIKPVNLIGVARGENIPAVIALTDPEGCPLPEFKDSSGGPTDILRIGEGYKEKQRAIQAAKEVEQRRAGGYSRKFASKSRNLADDMVRNSARDLFYHAVTHDAVLVFANLSRGFGRQGKRTFMTERQYTKMEDWLTAKLAYEGLTSKTYLSKTLAQYTSKTCSNCGFTITYADMDVMLVRLKKTSDGWATTLNNKELKAEYQITYYNRYKRQTVEKELSAELDRLSEESGNNDISKWTKGRRDEALFLLKKRFSHRPVQEQFVCLDCGHEVHAAEQAALNIARSWLFLNSNSTEFKSYKSGKQPFVGAWQAFYKRRLKEVWKPNA

SEQ ID NO: 35 - protein, 1210 aa, Unknown
  Description of Unknown: uncultured Parcubacteria group bacterium sequence
MSKRHPRISGVKGYRLHAQRLEYTGKSGAMRTIKYPLYSSPSGGRTVPREIVSAINDDYVGLYGLSNFDDLYNAEKRNEEKVYSVLDFWYDCVQYGAVFSYTAPGLLKNVAEVRGGSYELTKTLKGSHLYDELQIDKVIKFLNKKEISRANGSLDKLKKDIIDCFKAEYRERHKDQCNKLADDIKNAKKDAGASLGERQKKLFRDFFGISEQSENDKPSFTNPLNLTCCLLPFDTVNNNRNRGEVLFNKLKEYAQKLDKNEGSLEMWEYIGIGNSGTAFSNFLGEGFLGRLRENKITELKKAMMDITDAWRGQEQEEELEKRLRILAALTIKLREPKFDNHWGGYRSDINGKLSSWLQNYINQTVKIKEDLKGHKKDLKKAKEMINRFGESDTKEEAVVSSLLESIEKIVPDDSADDEKPDIPAIAIYRRFLSDGRLTLNRFVQREDVQEALIKERLEAEKKKKPKKRKKKSDAEDEKETIDFKELFPHLAKPLKLVPNFYGDSKRELYKKYKNAAIYTDALWKAVEKIYKSAFSSSLKNSFFDTDFDKDFFIKRLQKIFSVYRRFNTDKWKPIVKNSFAPYCDIVSLAENEVLYKPKQSRSRKSAAIDKNRVRLPSTENIAKAGIALARELSVAGFDWKDLLKKEEHEEYIDLIELHKTALALLLAVTETQLDISALDFVENGTVKDFMKTRDGNLVLEGRFLEMFSQSIVFSELRGLAGLMSRKEFITRSAIQTMNGKQAELLYIPHEFQSAKITTPKEMSRAFLDLAPAEFATSLEPESLSEKSLLKLKQMRYYPHYFGYELTRTGQGIDGGVAENALRLEKSPVKKREIKCKQYKTLGRGQNKIVLYVRSSYYQTQFLEWFLHRPKNVQTDVAVSGSFLIDEKKVKTRWNYDALTVALEPVSGSERVFVSQPFTIFPEKSAEEEGQRYLGIDIGEYGIAYTALEITGDSAKILDQNFISDPQLKTLREEVKGLKLDQRRGTFAMPSTKIARIRESLVHSLRNRIHHLALKHKAKIVYELEVSRFEEGKQKIKKVYATLKKADVYSEIDADKNLQTTVWGKLAVASEISASYTSQFCGACKKLWRAEMQVDETITTQELIGTVRVIKGGTLIDAIKDFMRPPIFDENDTPFPKYRDFCDKHHISKKMRGNSCLFICPFCRANADADIQASQTIALLRYVKEEKKVEDYFERFRKLKNIKVLGQMKKI

SEQ ID NO: 36 - protein, 1140 aa, Bacillus hisashii
MAPKKKRKVGIHGVPAAATRSFILKIEPNEEVKKGLWKTHEVLNHGIAYYMNILKLIRQEAIYEHHEQDPKNPKKVSKAEIQAELWDFVLKMQKCNSFTHEVDKDEVFNILRELYEELVPSSVEKKGEANQLSNKFLYPLVDPNSQSGKGTASSGRKPRWYNLKIAGDPSWEEEKKKWEEDKKKDPLAKILGKLAEYGLIPLFIPYTDSNEPIVKEIKWMEKSRNQSVRRLDKDMFIQALERFLSWESWNLKVKEEYEKVEKEYKTLEERIKEDIQALKALEQYEKERQEQLLRDTLNTNEYRLSKRGLRGWREIIQKWLKMDENEPSEKYLEVFKDYQRKHPREAGDYSVYEFLSKKENHFIWRNHPEYPYLYATFCEIDKKKKDAKQQATFTLADPINHPLWVRFEERSGSNLNKYRILTEQLHTEKLKKKLTVQLDRLIYPTESGGWEEKGKVDIVLLPSRQFYNQIFLDIEEKGKHAFTYKDESIKFPLKGTLGGARVQFDRDHLRRYPHKVESGNVGRIYFNMTVNIEPTESPVSKSLKIHRDDFPKVVNFKPKELTEWIKDSKGKKLKSGIESLEIGLRVMSIDLGQRQAAAASIFEVVDQKPDIEGKLFFPIKGTELYAVHRASFNIKLPGETLVKSREVLRKAREDNLKLMNQKLNFLRNVLHFQQFEDITEREKRVTKWISRQENSDVPLVYQDELIQIRELMYKPYKDWVAFLKQLHKRLEVEIGKEVKHWRKSLSDGRKGLYGISLKNIDEIDRTRKFLLRWSLRPTEPGEVRRLEPGQRFAIDQLNHLNALKEDRLKKMANTIIMHALGYCYDVRKKKWQAKNPACQIILFEDLSNYNPYEERSRFENSKLMKWSRREIPRQVALQGEIYGLQVGEVGAQFSSRFHAKTGSPGIRCSVVTKEKLQDNRFFKNLQREGRLTLDKIAVLKEGDLYPDKGGEKFISLSKDRKCVTTHADINAAQNLQKRFWTRTHGFYKVYCKAYQVDGQTVYIPESKDQKQKIIEEFGEGYFILKDGVYEWVNAGKLKIKKGSSKQSSSELVDSDILKDSFDLASELKGEKLMLYRDPSGNVFPSDKWMAAGVFFGKLERILISKLTNQYSISTIEDDSSKQSMKRPAATKKAGQAKKKK

SEQ ID NO: 37 - protein, 357 aa, Homo sapiens
MEEGMNVLHDFGIQSTHYLQVNYQDSQDWFILVSVIADLRNAFYVLFPIWFHLQEAVGIKLLWVAVIGDWLNLVFKWILFGQRPYWWVLDTDYYSNTSVPLIKQFPVTCETGPGSPSGHAMGTAGVYYVMVTSTLSIFQGKIKPTYRFRCLNVILWLGFWAVQLNVCLSRIYLAAHFPHQVVAGVLSGIAVAETFSHIHSIYNASLKKYFLITFFLFSFAIGFYLLLKGLGVDLLWTLEKAQRWCEQPEWVHIDTTPFASLLKNLGTLFGLGLALNSSMYRESCKGKLSKWLPFRLSSIVASLVLLHVFDSLKPPSQVELVFYVLSFCKSAVVPLASVSVIPYCLAQVLGQPHKKSL

SEQ ID NO: 38 - DNA, 13637 bp, Homo sapiens
atagcagagcaatcaccaccaagcctggaataactgcaagggctctgctgacatcttcctgaggtgccaaggaaatgaggatggaggaaggaatgaatgttctccatgactttgggatccagtcaacacattacctccaggtgaattaccaagactcccaggactggttcatcttggtgtccgtgatcgcagacctcaggaatgccttctacgtcctcttccccatctggttccatcttcaggaagctgtgggcattaaactcctttgggtagctgtgattggagactggctcaacctcgtctttaagtggtaagaaccatatagagaggagatcagcaagaaaagaggctggcattcgctctcgcaatgtctgtccatcagaagttgctttccccaggctattcaggaagccacgggctactcatgcttccaacccctctctctgactttggatcatctacataaagggggaagacagaaaaaatcctaccagtgagttgaaaatacaggaaagcctatttcatatgggttaaagggtaggacagttgaatttcgtgaaaagtctgagttatataggctttgagcaaagagttttattagtatgaagcagaagaggtaacataaagaaagatgtatggggccaggcatggtggctcacacctgtaatcccagcactttgggaggccgaggtgggcgaatcactcctgggtgaactcaggagttcaagaccagcctgggcaacatggcgaaactccatctctacaaaaacattacgaaaattagctgggcgtgttggtgctgtagtcccagctactcaggaggctgaggtgagaggcggaggaggttgcagtgagtcaagatcatgccactgcactccagcctgggcaacagagtaagaccctgtctcaaaaaaaaaaaaaagatagatgatgtatgctgtatgaaaaaaggaaacacacagatgattcaacagcctgttttgtggggtaatgaaaagtcaccctgggaactgggctccagccctcgttctgccacccaccaactacatgtccttggcaagtcatatcaattatctgagtttctgttttataatctacaaataggttatctctggcagcttaataataatcagggttaacatttattaaacagtgtgtgccagtccatgtgctatgtgcttttctgtgaggtagttactgctatttacagaaacagtagatgcagagaccaaggtgctgagttaaatgattaggccaacaaggttagtacatgccgagccaggatggaagcccaggtaggcaggctggcttccgcggcaatgctcttatgaactatgttacgtccagtgctgataaactgactctctggggagcaggggaaagccctgagtttagcatttgccaatttctatcacgtaaacattcccattctggccactttctttctttctttcttttgtttgtttgtttgagatggagtctcgcactgttgcctggctggagtgcaatggtgcaatctcagctcactgcaacctctgcctctccggttcaagtgattctcctgcctcagcctcccaagtagctgggattacaggtgcccgccaccatgcccagctaattttttttgtatttttagtagagacatggtttcactatgttgactaggctggtctcgaactcctgacctcatgatctgcctgccttggcctccctaagtgctaggattacaggcgtgagccactacacccagccgcatgattctaaaaaataaaaagatgaagtgttattccaaacatctgatctccattgaagaaccatgcaatctctctgggttgatagaggccagagttagtggctctccctgatttcggtgagaaatcactattccaccatcacgggataaaaggcatcctgactggcggttgacacctatttccacagtgaaagatatatctagtacttttaaaggggaagtggtttgtctgagatactctgtttcaaagtagagaggatacagaacaagcatctgaagctatatacatccttacagagagcaattctgatggaaatgcaggccatgtttccctggggggggctcgtcctaggggctggagtgcattctctgatgtcagaggaaatgcaagattccctgaggcctgagggaacccatggtatatgcaagtccaagtttcaaactgtagttccatatgcattcttccaggacaaatacttcttgaggttaaaaaaaaaaagtcacatagctgccattttatggatttcaggatttttttttttttttttttgagatggagtcttgctctgtcacccagcctgtagtgcagtggcataatctcggctcacggcaacctccgcctcccaggttcaagcgattctcttgccttagcctcccgagtagctgggattacagtcacgcaccaccacatctggctaattctttatattttttggtagaaacggtgtttcaccatgttggccaggctggtctcaaactcctgacctcatgtgatctgcctgccttggcctcccaaagtgctgagattacaggtgtgagccaccgcgcctgcctggagttcagaatcttgggcttcattatttgtgtttaaatagatcatacagtcaggcacggtggctcatgcctgtaatcccagcactttgggaggctgaggtgggaggattgcctgagttcaggagatggagaccagcctgggcaacatggtgaaaccccgtctctactaaaaatacaaaaactagctggatgtggtggcacacacctgtagtcccagctattcaggaggctgaggtgggaggatcccaggaggtagaggtcacaatgagccgagattgcgccactgcactccaggctgggttactgagccagatcctgtctcaaaaaaaaaaaagataatacattcaaacagttcaaaatgcaaaagttacatacataaggaagtgtcatgaaatatctccctctcacacttctccccagccacccagttctcccttctagaggcaacatgtgaaatccttctcaggctacactcttcttgaaggtgtaggctttgggcaaaagcattcattcagtaaccccagaaacttgttctgtttttccataggattctctttggacagcgtccatactggtgggttttggatactgactactacagcaacacttccgtgcccctgataaagcagttccctgtaacctgtgagactggaccaggtaagcgtcccagcccctgcagacagaagctgagtggacctcgtttacctgttatggatgaaactgaccttgaggggacatgaggagagccattcctttgtacttttgtcatgctcttcaattggcacaaattaattcacttctgcaatactttcctgaatagcacagtagtattggaaatctgcctattacagaacctggatggagtccagagaggcacgggcatccatgggcaaagggctcgtgagagtcaccgccctgcagcgctgtgtcctgagaaaggagggggcagaagcctgagcttctgggggtccttcccaatggcctggcccactggatgtgccctcctgagctgaccgtccaatcccttgccctctctgtgcctacgttttattagttacagccagatggttactgtcaaatcaaatgatagatttcattttcagtatgtaataggaagcccctccctcaccctaaagtctcagctgccctctaagactagtactctctaaggtactagtatcccttcctcagagaccctttccctgaccccaaaactagggaaggtcccttagttatttgctctcacagaccacgcatttacctcagagcatattcactcattcagctgttacttaccaagcacctactgggagctatacactgttctatgtgctagggatacctctgtcagtgaacaacacagacacaaagatccctgcccttgtggagctgaaatctgaatagaggaggtgaaatatacaaaaattataataaataagtaaactaggccagttgtggttgctcatgcctgtaatcccagcactttgggaagccaaggtaggtagatcacctgaggtcaggagttcaaaaccagcctggccaacattgcaaaatcctgtctttactaaaaatggaaaaattggtcaggcgtgatggcacacgcctgtagtctcagctacctgggaggctgaggcaggagaatcgcttgaacctgggaggcagaggttgcagtgaaccgagatcggaccactgcactccagcctgaatgacagaacgagactctgtctcaaaaaaaaagtaaactattaatatgtaggataggccaggcacggtggctcaccctgtaatcccagcactttgggaggctgaggcgggtggatcacctgaggtgaggagttcaagaccagcctggccaacatggcaaaaccctgtctctactaaaaatacaaaaattagctgggtgtcctggtgcatgcctgtaatctgagctactcaggaggctaaggcaggagaatcgcttgaacctgggaggtggtgagccaagattgcgccattgcactccagcctgggcgacaaaatgagacaccatctgaaaaaaaaaaaaaaatatatatatatatacacacacacacacacacacacacacacacacatataatactagaaaatgattgtttataggcaaaaaaaaaaaaaaagaagaagaagaagaaaaggaaaggagaaggaaagaaggaccaaacatcttttgtagaaatatgtttgctttcatcataacagcttgttatcaaggatgaatttctccctgaaattaatggaggcacagactggaaagtttaaagtggctttaagaggttattttatttagtcctctgtcttaatagaagcaaattattatctctgctccttaggtagagtagctaaggctcagaaagtaggccgggcgcggtggctcacgcctgtaatcctagcactttgggaggccaacgcaggtggatcacctgaggtcaggagtttgagaccagcctggccaacatggtgaaacctcgtcactaataaaaaaatacaaaaacttagccaggcatggtggcgggcgcctgtaatcccagctacccaggaggctgcggcaggagaatcacttcaacccgggaggcagaggttgcagtgagctgaaatcacaccactgcactccagccttggtgacagagaaagattctgtcaggaaaaaaaaaaaaaagtttaaatgaattacccaaggtatataattgttagtgttagaaggaagaagaagggagggaggaaggaagggagaaagaaagggaaggaggaagggagggagggaagaaagcctttatttatctatggggttccctggaaagcaggctgaaatggagattcacgtgcaggagtttagatactctggggaactatacttgtagaagggaaggaacaggaacagggcagaaggagaggtccggttgtgattctgcctcatccaaccccacagcgagctctgaagctggggatggctcctcagagttggtccaagttgggacaagggaatcagaccctggggagagcgtaaccttgatcaaggcgactctctttagcccagggcaatgccaggagaaggctgagagcagaaagccatctaccatcacactctcaacagctacgaaataagtcctgcagttcaggagggaggtctgggcggcacatctcaggaccctctatctctcagggtagaggaattaagaatgggatgggaaccagacgggccatggtggctcacacctataatcccaacactttgggaggccaagggtaggaggattgcttgagcccaagagttcaaaaccagcctgggcaaaaacaatcaaacaaacaaacaaaacacatttaaaaaatttgctgtgtgtggtggtgtgcacctgtggtcccagctactcagggggctgaggtgggaggattgcttgagtccaggaggtcgaggctgcagtgagctatgatcatggcactgcattgcagcctaggagacaaagcaagacactgtctctaaaaaaacaaaaaacaaacaaataaaaaaacggaaccggttgcaagcagggttaaatagcgtggtcagagtaggactcactgagaatatgagatctgagtcaagtcttcaaggatgtgaggaagtaagtttctggcagaagagctgtgaagggctgtctggccagagaagattgcaatgcaaaagccctgaggtgggaacgtgtttggtgtgtttaaaggaaagcaatgaggccagtgtagccagaacagagtgtgcaaggagagaaggaacagaagatgtggagggcagatcagtttgtaattgtacgcccagtatgctgattctttgtgtaatctccagactgtattaaactgcaagagcagggcccctctctggctttgctcatcattgtattcccagagccttgcacaatgcttggtgcataggagatggaaatttgttaaataaatgaattatggataacgaatggatggtaagatgggtggatggatggggggtgaacggatggatggggggtgaatggatggatgaatgggtagatgggtggatagggggatggctgggtggctgggtagatgatgcactgtctcccagatgaggaccttttcacctttactccattctctttcctgccctttagggagcccctctggccatgccatgggcacagcaggtgtatactacgtgatggtcacatctactctttccatctttcagggaaagataaagccgacctacagatttcggtaagaactcaccactggggtgtaggtggtggagggcaggaggcagctctctctgtagctgacacaccacgtattcttcctcacatccccctagcccgctcccacacctgggcagccgctgattaagagttgtggcactttggatagggataaacctcagagtcagggaatgtttgggctgaaagggatccagtagtgcaatccgttgttttacagataaggaaacaaagcccaacaccatgaagggacttataaaaataaggtagtgaagtagcagcagggcttaaataaaaacccatgtctgtaccaaccacagagtcacccatccaggttaaaataaccagagaaacagaagatattcctactacagagaattccgggtgtgcagccacagtgcaaatcctttttatttttatttttgagatgcagtctcgctctgtcatccaggctgaagtgcagtggcacgatcatgtctcgctgcaacctctgcctcccaggctcaagcgatcctcccacctcagccatctgagtagctgggaccacaggccacacaccacacccagctaatttctcgtatctttttgtagagacagagttctgctatgttgcccaggctcaggctggtcttgatctcaagcaattggcttgcctcagcctcctaaaatattgggattacaggcatgagccaccgcgccagccatgcaaatccttaattatcaaacagataaaatagggaagttaaaattcatatacacaagggttaaccacttgccacaggcattttttttttttttttgagacggaatctcgctctgttgcccaggctggagtgcagtggcgccatctcgcctcactgcaacctccgcttcctgggttcaagctattcttctgcctcagcctaccgagtagctgggactacaggcacgtgccaccacacctggctaatttttttatttttagtagagatggggtttcaccatattggccaggctggtcttgaactcctgacctagtgatccatccgcctcagcctcccaaagtgctgggattgcaggcatgagccaccgcgcctggccttttttttttttttttgagacggagttttgctcttgttgcccaggctagagtgcagtggcgcagtctcggctcactgtaacctccacctcctgagttcaagcaattctcctgcctcagcctctcaaatagctgggattacaggcgtgagccaccccacctggctaattttgtaattttttttttagtagagatggggtttcacctgttgatcaggctggtctcaaactcctgacctcaagtgatccacccacctcggcctcccaaagtgctgggattacaagcataagccaccgtgcctggtcaattttgatcttttttaaagagacaggggtcttgctatgttgcccagactagtcttgaactcctggcctcaagtgatcctctcacctcggcctcccaaagtattgggattacaggtctgagccgctgcacccagcccccaacaggcatctttggacttttgagtactggctttaatttacaaaaattccactgagagcacctaagtttgccaggctccaacatttctgcaggggctgttttctttgctgaaggatctgcacctgtgttctgttatggttgcctcttctgttgcaggtgcttgaatgtcattttgtggttgggattctgggctgtgcagctgaatgtctgtctgtcacgaatctaccttgctgctcattttcctcatcaagttgttgctggagtcctgtcaggtatgggctgatctgactcccttccttctcccccaaaccccattccgtttctctccctaatcaggacaaaatcccagcattccagccacatcctgtgtgtaatcagtactgttagcatttctgtgggttgaaagtcaagaatgagcaacttgaaatgattaatttctataagagtgcccagatctatagaatgaattgtgtagaagttaccatacatcaaattaacgcaccaaattgaattagcttgaaatctcagagctttttacaatctttatttcttactggtcttcaacaggccctaatttacttttcagggaatctgccaaatttaacaaattaacacgatgtcctaggaaagctgttcatttaaatacattcatttgcaaacctaatagataactgcagttgatctcttttataggttcagagttttgaatatgtttttttttgttttttttttttgagatggagtctcgctctgtgacccaggctagagtgcagtggtgcgatctcggctcactgcaagctccacctcctgggttcacgccattctcctgcctcagcctctccgagtagctgggactacaggcgcccgccaccatgcccggctaattttttgtatttttagcagagacggggtttcaccgtggtcttgatctcctgacctcgtgatccgcccgcctcggcctcccaaagcgctgggattacaagggtgagccaccgcaccctgcctgaatatgtgttttcttagatccaattaacaagggtaagacaagatttaagttaagcataagaaagattttgtgggaggcactggaatataagaccttaacaaaactgtggaatttctcccctggagatttgtaagaacggaacatagcagcattcaaagaagaatgttgagaacaagggagataatggtttcatggtaatcacaaaagtaacacagcatttagtactgggttccatgtttgaggaagaacctggaagccatatcacatgaaaaacctgggaatgtttaggttagagagaataactgtgttcaaatgtgtgacagagggactagattcatcacttactaactcctgcagaaagaactgagaaaaatagacagtattagagggggaccagtttcacacagacaaggaagaactattcagcaatcaattccgttcaaagataaaatggactgttatagtgggggtgagctccctacctctgagggtatttcaagtagagataggaggacctcctggtaggaaatttgcatacggtgggagattgtacgtgatatggcacctccatctgaaagagtctatattgagggcaggctggagtcacacatgggaataagccaggcgaccctcccatctgccatctgtgatttaattccacagtcgcagaacggatggcatgtcacccactcctccaaacccacctctagcaaaggtcccaaatccttcctatctctcacagtcatgctttcttccactcaggcattgctgttacagaaactttcagccacatccacagcatctataatgccagcctcaagaaatattttctcattaccttcttcctgttcagcttcgccatcggattttatctgctgctcaagggactgggtgtagacctcctgtggactctggagaaagcccagaggtggtgcgagcagccagaatgggtccacattgacaccacaccctttgccagcctcctcaagaacctgggcacgctctttggcctggggctggctctcaactccagcatgtacagggagagctgcaaggggaaactcagcaagtggctcccattccgcctcagctctattgtagcctccctcgtcctcctgcacgtctttgactccttgaaacccccatcccaagtcgagctggtcttctacgtcttgtccttctgcaagagtgcggtagtgcccctggcatccgtcagtgtcatcccctactgcctcgcccaggtcctgggccagccgcacaagaagtcgttgtaagagatgtggagtcttcggtgtttaaagtcaacaaccatgccagggattgaggaggactactatttgaagcaatgggcactggtatttggagcaagtgacatgccatccattctgccgtcgtggaattaaatcacggatggcagattggagggtcgcctggcttattcccatgtgtgactccagcctgccctcagcacagactctttcagatggaggtgccatatcacgtacaccatatgcaagtttcccgccaggaggtcctcctctctctacttgaatactctcacaagtagggagctcactcccactggaacagcccattttatctttgaatggtcttctgccagcccattttgaggccagaggtgctgtcagctcaggtggtcctcttttacaatcctaatcatattgggtaatgtttttgaaaagctaatgaagctattgagaaagacctgttgctagaagttgggttgttctggattttcccctgaagacttacttattcttccgtcacatatacaaaagcaagacttccaggtagggccagctcacaagcccaggctggagatcctaactgagaattttctacctgtgttcattcttaccgagaaaaggagaaaggagctctgaatctgataggaaaagaaggctgcctaaggaggagtttttagtatgtggcgtatcatgcaagtgctatgccaagccatgtctaaatggctttaattatatagtaatgcactctcagtaatgggggaccagcttaagtataattaatagatggttagtggggtaattctgcttctagtattttttttactgtgcatacatgttcatcgtatttccttggatttctgaatggctgcagtgacccagatattgcactaggtcaaaacattcaggtatagctgacatctcctctatcacattacatcatcctccttataagcccagctctgctttttccagattcttccactggctccacatccaccccactggatcttcagaaggctagagggcgactctggtggtgcttttgtatgtttcaattaggctctgaaatcttgggcaaaatgacaaggggagggccaggattcctctctcaggtcactccagtgttacttttaattcctagagggtaaatatgactcctttctctatcccaagccaaccaagagcacattcttaaaggaaaagtcaacatcttctctctttttttttttttttgagacagggtctcactatgttgcccaggctgctcttgaattcctgggctcaagcagtcctcccaccctaccacagcgtcccgcgtagctgggactacaggtgcaagccactatgtccagctagccaactcctccttgcctgcttttctttttttttctttttttgagacggcgcacctatcacccaggctggagtggagtggcacgatcttggctcactgcaacctcttcctcctggttcaagcgattctcatgtctcagcctcctcagtagctaggactaccggcgtgcaccaccatgccaggctaatttttatatttttagaattttagaagagatgggatttcatcatgttggccaggctggtctcgaactcctgacctcaagtgatccacctgccttggcctcccaaggtgctaggattacaggcatgagccaccgcaccgggccctccttgcctgtttttcaatctcatctgatatgcagagtatttctgccccacccacctaccccccaaaaaaagctgaagcctatttatttgaaagtccttgtttttgctactaattatatagtataccatacattatcattcaaaacaaccatcctgctcataacatctttgaaaagaaaaatatatatgtgcagtattttattaaagcaacattttatttaagaataaagtcttgttaattactatattttagatgcaatgtgatctgaagtttctaattctggcccaactaaatttctagctctgtttccctaaacaaataatttggtttctctgtgcctgcattttccctttggagaagaaaagtgctctctcttgagttgaccgagagtcccattagggatagggagacttaaatgcatccacaggggcacaggcagagttgagcacataaacggaggcccaaaatcagcatagaaccagaaagattcagagttggccaagaatgaacattggctaccagaccacaagtcagcatgagttgctctatggcatcaaattgcaacttgagagtagatgggcagggtcactatcaaattaagcaatcagggcacacaagttgcagtaacacaacaagactaggccagctctggaatccagtaactcagtgtcagcaaggttttgggttatagttcaagaaagtctaaacagagccagtcacagcaccaaggaatgctcaagggagctattgcaggtttctctgctaagagatttatttcatcctgggtgcagggttcgacctccaaaggcctcaaatcatcaccgtatcaatggatttcctgagggtaagctccgctatttcacacctgaactccggagtctgtatattcagggaagattgcattctcctactggatttgggctctcagagggcgttgtgggaaccaggcccctcacagaatcaaatggtcccaaccagggagaaagaaaatagtcttttttttttttttaatagagatgggggtctcactatgctgcccaggctggtcttgaactcctgggttcaagtgatcctcctgcctcagcctcccaaagtgctgggattacagtgtgagccactgcgcttggccagaaatggttttgatctgtctgaactgaaccctactgcttaggcatagccccatccttgataatctatttgctcccaaggaccaagtccaagatccttacaagaaaggtctgccagaaagtaaatactgcccccactccctgaagtttatgaggttgataagaaaacataacagataaagtttattgagtgctaacttta

SEQ ID NO: 39 - DNA, 306 bp, Unknown
  Description of Unknown: DnaE Intein-N  sequence
tgcctgtcatacgaaaccgagatactgacagtagaatatggccttctgccaatcgggaagattgtggagaaacggatagaatgcacagtttactctgtcgataacaatggtaacatttatactcagccagttgcccagtggcacgaccggggagagcaggaagtattcgaatactgtctggaggatggaagtctcattagggccactaaggaccacaaatttatgacagtcgatggccagatgctgcctatagacgaaatctttgagcgagagttggacctcatgcgagttgacaaccttcctaat

SEQ ID NO: 40 - protein, 102 aa, Unknown
  Description of Unknown: DnaE Intein-N  sequence
CLSYETEILTVEYGLLPIGKIVEKRIECTVYSVDNNGNIYTQPVAQWHDRGEQEVFEYCLEDGSLIRATKDHKFMTVDGQMLPIDEIFERELDLMRVDNLPN

SEQ ID NO: 41 - DNA, 108 bp, Unknown
  Description of Unknown: DnaE Intein-C sequence
atgatcaagatagctacaaggaagtatcttggcaaacaaaacgtttatgatattggagtcgaaagagatcacaactttgctctgaagaacggattcatagcttctaat

SEQ ID NO: 42 - protein, 36 aa, Unknown
  Description of Unknown: Intein-C sequence
MIKIATRKYLGKQNVYDIGVERDHNFALKNGFIASN

SEQ ID NO: 43 - DNA, 303 bp, Artificial Sequence
  Description of Artificial Sequence: Synthetic polynucleotide
tgcctgtcttatgataccgagatacttaccgttgaatatggcttcttgcctattggaaagattgtcgaagagagaattgaatgcacagtatatactgtagacaagaatggtttcgtttacacacagcccattgctcaatggcacaatcgcggcgaacaagaagtatttgagtactgtctcgaggatggaagcatcatacgagcaactaaagatcataaattcatgaccactgacgggcagatgttgccaatagatgagatattcgagcggggcttggatctcaaacaagtggatggattgcca

SEQ ID NO: 44 - protein, 101 aa, Artificial Sequence
  Description of Artificial Sequence: Synthetic polypeptide
CLSYDTEILTVEYGFLPIGKIVEERIECTVYTVDKNGFVYTQPIAQWHNRGEQEVFEYCLEDGSIIRATKDHKFMTTDGQMLPIDEIFERGLDLKQVDGLP

SEQ ID NO: 45 - DNA, 159 bp, Artificial Sequence
  Description of Artificial Sequence: Synthetic polynucleotide
atgaagaggactgccgatggatcagagtttgaatctcccaagaagaagaggaaagtaaagataatatctcgaaaaagtcttggtacccaaaatgtctatgatattggagtggagaaagatcacaacttccttctcaagaacggtctcgtagccagcaac

SEQ ID NO: 46 - protein, 53 aa, Artificial Sequence
  Description of Artificial Sequence: Synthetic polypeptide
MKRTADGSEFESPKKKRKVKIISRKSLGTQNVYDIGVEKDHNFLLKNGLVASN

SEQ ID NO: 47 - protein, 24 aa, Artificial Sequence
  Description of Artificial Sequence: Synthetic peptide
SGGSSGSETPGTSESATPESSGGS

SEQ ID NO: 48 - protein, 32 aa, Artificial Sequence
  Description of Artificial Sequence: Synthetic polypeptide
SGGSSGGSSGSETPGTSESATPESSGGSSGGS

SEQ ID NO: 49 - protein, 104 aa, Artificial Sequence
  Description of Artificial Sequence: Synthetic polypeptide
GGSGGSPGSPAGSPTSTEEGTSESATPESGPGTSTEPSEGSAPGSPAGSPTSTEEGTSTEPSEGSAPGTSTEPSEGSAPGTSESATPESGPGSEPATSGGSGGS

SEQ ID NO: 50 - protein, 16 aa, Artificial Sequence
  Description of Artificial Sequence: Synthetic peptide
SGSETPGTSESATPES

SEQ ID NO: 51 - protein, 4 aa, Artificial Sequence
  Description of Artificial Sequence: Synthetic peptide
SGGS

SEQ ID NO: 52 - protein, 120 aa, Artificial Sequence
  Description of Artificial Sequence: Synthetic polypeptide
  MISC_FEATURE (1)..(120): This sequence may encompass 1-30 "Ser Gly Gly Ser" repeating units
SGGSSGGSSGGSSGGSSGGSSGGSSGGSSGGSSGGSSGGSSGGSSGGSSGGSSGGSSGGSSGGSSGGSSGGSSGGSSGGSSGGSSGGSSGGSSGGSSGGSSGGSSGGSSGGSSGGSSGGS

SEQ ID NO: 53 - protein, 120 aa, Artificial Sequence
  Description of Artificial Sequence: Synthetic polypeptide
  MISC_FEATURE (1)..(120): This sequence may encompass 1-30 "Gly Gly Gly Ser" repeating units
GGGSGGGSGGGSGGGSGGGSGGGSGGGSGGGSGGGSGGGSGGGSGGGSGGGSGGGSGGGSGGGSGGGSGGGSGGGSGGGSGGGSGGGSGGGSGGGSGGGSGGGSGGGSGGGSGGGSGGGS

SEQ ID NO: 54 - protein, 150 aa, Artificial Sequence
  Description of Artificial Sequence: Synthetic polypeptide
  MISC_FEATURE (1)..(150): This sequence may encompass 1-30 "Gly Gly Gly Gly Ser" repeating units
GGGGSGGGGSGGGGSGGGGSGGGGSGGGGSGGGGSGGGGSGGGGSGGGGSGGGGSGGGGSGGGGSGGGGSGGGGSGGGGSGGGGSGGGGSGGGGSGGGGSGGGGSGGGGSGGGGSGGGGSGGGGSGGGGSGGGGSGGGGSGGGGSGGGGS

SEQ ID NO: 55 - protein, 30 aa, Artificial Sequence
  Description of Artificial Sequence: Synthetic polypeptide
  MISC_FEATURE (1)..(30): This sequence may encompass 1-30 residues
GGGGGGGGGGGGGGGGGGGGGGGGGGGGGG

SEQ ID NO: 56 - protein, 150 aa, Artificial Sequence
  Description of Artificial Sequence: Synthetic polypeptide
  MISC_FEATURE (1)..(150): This sequence may encompass 1-30 "Glu Ala Ala Ala Lys" repeating units
EAAAKEAAAKEAAAKEAAAKEAAAKEAAAKEAAAKEAAAKEAAAKEAAAKEAAAKEAAAKEAAAKEAAAKEAAAKEAAAKEAAAKEAAAKEAAAKEAAAKEAAAKEAAAKEAAAKEAAAKEAAAKEAAAKEAAAKEAAAKEAAAKEAAAK

SEQ ID NO: 57 - protein, 90 aa, Artificial Sequence
  Description of Artificial Sequence: Synthetic polypeptide
  MISC_FEATURE (1)..(90): This sequence may encompass 1-30 "Gly Gly Ser" repeating units
GGSGGSGGSGGSGGSGGSGGSGGSGGSGGSGGSGGSGGSGGSGGSGGSGGSGGSGGSGGSGGSGGSGGSGGSGGSGGSGGSGGSGGSGGS

SEQ ID NO: 58 - protein, 60 aa, Artificial Sequence
  Description of Artificial Sequence: Synthetic polypeptide
  MOD_RES (1)..(1): Any amino acid
  MOD_RES (3)..(3): Any amino acid
  MOD_RES (5)..(5): Any amino acid
  MOD_RES (7)..(7): Any amino acid
  MOD_RES (9)..(9): Any amino acid
  MOD_RES (11)..(11): Any amino acid
  MOD_RES (13)..(13): Any amino acid
  MOD_RES (15)..(15): Any amino acid
  MOD_RES (17)..(17): Any amino acid
  MOD_RES (19)..(19): Any amino acid
  MOD_RES (21)..(21): Any amino acid
  MOD_RES (23)..(23): Any amino acid
  MOD_RES (25)..(25): Any amino acid
  MOD_RES (27)..(27): Any amino acid
  MOD_RES (29)..(29): Any amino acid
  MOD_RES (31)..(31): Any amino acid
  MOD_RES (33)..(33): Any amino acid
  MOD_RES (35)..(35): Any amino acid
  MOD_RES (37)..(37): Any amino acid
  MOD_RES (39)..(39): Any amino acid
  MOD_RES (41)..(41): Any amino acid
  MOD_RES (43)..(43): Any amino acid
  MOD_RES (45)..(45): Any amino acid
  MOD_RES (47)..(47): Any amino acid
  MOD_RES (49)..(49): Any amino acid
  MOD_RES (51)..(51): Any amino acid
  MOD_RES (53)..(53): Any amino acid
  MOD_RES (55)..(55): Any amino acid
  MOD_RES (57)..(57): Any amino acid
  MOD_RES (59)..(59): Any amino acid
  MISC_FEATURE (1)..(60): This sequence may encompass 1-30 "Xaa Pro" repeating units
XPXPXPXPXPXPXPXPXPXPXPXPXPXPXPXPXPXPXPXPXPXPXPXPXPXPXPXPXPXP

SEQ ID NO: 59 - protein, 24 aa, Artificial Sequence
  Description of Artificial Sequence: Synthetic peptide
SGGSSGGSSGSETPGTSESATPES

SEQ ID NO: 60 - protein, 40 aa, Artificial Sequence
  Description of Artificial Sequence: Synthetic polypeptide
SGGSSGGSSGSETPGTSESATPESSGGSSGGSSGGSSGGS

SEQ ID NO: 61 - protein, 64 aa, Artificial Sequence
  Description of Artificial Sequence: Synthetic polypeptide
SGGSSGGSSGSETPGTSESATPESSGGSSGGSSGGSSGGSSGSETPGTSESATPESSGGSSGGS

SEQ ID NO: 62 - protein, 92 aa, Artificial Sequence
  Description of Artificial Sequence: Synthetic polypeptide
PGSPAGSPTSTEEGTSESATPESGPGTSTEPSEGSAPGSPAGSPTSTEEGTSTEPSEGSAPGTSTEPSEGSAPGTSESATPESGPGSEPATS

SEQ ID NO: 63 - protein, 18 aa, Artificial Sequence
  Description of Artificial Sequence: Synthetic peptide
KRTADGSEFESPKKKRKV

SEQ ID NO: 64 - protein, 16 aa, Artificial Sequence
  Description of Artificial Sequence: Synthetic peptide
KRPAATKKAGQAKKKK

SEQ ID NO: 65 - protein, 17 aa, Artificial Sequence
  Description of Artificial Sequence: Synthetic peptide
KKTELQTTNAENKTKKL

SEQ ID NO: 66 - protein, 19 aa, Artificial Sequence
  Description of Artificial Sequence: Synthetic peptide
KRGINDRNFWRGENGRKTR

SEQ ID NO: 67 - protein, 16 aa, Artificial Sequence
  Description of Artificial Sequence: Synthetic peptide
RKSGKIAAIVVKRPRK

SEQ ID NO: 68 - protein, 7 aa, Artificial Sequence
  Description of Artificial Sequence: Synthetic peptide
PKKKRKV

SEQ ID NO: 69 - protein, 30 aa, Artificial Sequence
  Description of Artificial Sequence: Synthetic polypeptide
MDSLLMNRRKFLYQFKNVRWAKGRRETYLC

SEQ ID NO: 70 - protein, 84 aa, Bacillus phage PBS2
MTNLSDIIEKETGKQLVIQESILMLPEEVEEVIGNKPESDILVHTAYDESTDENVMLLTSDAPEYKPWALVIQDSNGENKIKML

SEQ ID NO: 71 - protein, 1368 aa, Artificial Sequence [sequence omitted]

SEQ ID NO: 72 - protein, 987 aa, Unknown
  Description of Unknown: Deltaproteobacteria CasX sequence
MEKRINKIRKKLSADNATKPVSRSGPMKTLLVRVMTDDLKKRLEKRRKKPEVMPQVISNNAANNLRMLLDDYTKMKEAILQVYWQEFKDDHVGLMCKFAQPASKKIDQNKLKPEMDEKGNLTTAGFACSQCGQPLFVYKLEQVSEKGKAYTNYFGRCNVAEHEKLILLAQLKPVKDSDEAVTYSLGKFGQRALDFYSIHVTKESTHPVKPLAQIAGNRYASGPVGKALSDACMGTIASFLSKYQDIIIEHQKVVKGNQKRLESLRELAGKENLEYPSVTLPPQPHTKEGVDFAYNEVIARVRMWVNLNLWQKLKLSRDDAKPLLRLKGFPSFPVVERRENEVDWWNTINEVKKLIDAKRDMGRVFWSGVTAEKRNTILEGYNYLPNENDHKKREGSLENPKKPAKRQFGDLLLYLEKKYAGDWGKVFDEAWERIDKKIAGLTSHIEREEARNAEDAQSKAVLTDWLRAKASFVLERLKEMDEKEFYACEIQLQKWYGDLRGNPFAVEAENRVVDISGFSIGSDGHSIQYRNLLAWKYLENGKREFYLLMNYGKKGRIRFTDGTDIKKSGKWQGLLYGGGKAKVIDLTFDPDDEQLIILPLAFGTRQGREFIWNDLLSLETGLIKLANGRVIEKTIYNKKIGRDEPALFVALTFERREVVDPSNIKPVNLIGVARGENIPAVIALTDPEGCPLPEFKDSSGGPTDILRIGEGYKEKQRAIQAAKEVEQRRAGGYSRKFASKSRNLADDMVRNSARDLFYHAVTHDAVLVFANLSRGFGRQGKRTFMTERQYTKMEDWLTAKLAYEGLTSKTYLSKTLAQYTSKTCSNCGFTITYADMDVMLVRLKKTSDGWATTLNNKELKAEYQITYYNRYKRQTVEKELSAELDRLSEESGNNDISKWTKGRRDEALFLLKKRFSHRPVQEQFVCLDCGHEVHAAEQAALNIARSWLFLNSNSTEFKSYKSGKQPFVGAWQAFYKRRLKEVWKPNA

SEQ ID NO: 73 - protein, 1300 aa, Francisella novicida
MSIYQEFVNKYSLSKTLRFELIPQGKTLENIKARGLILDDEKRAKDYKKAKQIIDKYHQFFIEEILSSVCISEDLLQNYSDVYFKLKKSDDDNLQKDFKSAKDTIKKQISEYIKDSEKFKNLFNQNLIDAKKGQESDLILWLKQSKDNGIELFKANSDITDIDEALEIIKSFKGWTTYFKGFHENRKNVYSSNDIPTSIIYRIVDDNLPKFLENKAKYESLKDKAPEAINYEQIKKDLAEELTFDIDYKTSEVNQRVFSLDEVFEIANFNNYLNQSGITKFNTIIGGKFVNGENTKRKGINEYINLYSQQINDKTLKKYKMSVLFKQILSDTESKSFVIDKLEDDSDVVTTMQSFYEQIAAFKTVEEKSIKETLSLLFDDLKAQKLDLSKIYFKNDKSLTDLSQQVFDDYSVIGTAVLEYITQQIAPKNLDNPSKKEQELIAKKTEKAKYLSLETIKLALEEFNKHRDIDKQCRFEEILANFAAIPMIFDEIAQNKDNLAQISIKYQNQGKKDLLQASAEDDVKAIKDLLDQTNNLLHKLKIFHISQSEDKANILDKDEHFYLVFEECYFELANIVPLYNKIRNYITQKPYSDEKFKLNFENSTLANGWDKNKEPDNTAILFIKDDKYYLGVMNKKNNKIFDDKAIKENKGEGYKKIVYKLLPGANKMLPKVFFSAKSIKFYNPSEDILRIRNHSTHTKNGSPQKGYEKFEFNIEDCRKFIDFYKQSISKHPEWKDFGFRFSDTQRYNSIDEFYREVENQGYKLTFENISESYIDSVVNQGKLYLFQIYNKDFSAYSKGRPNLHTLYWKALFDERNLQDVVYKLNGEAELFYRKQSIPKKITHPAKEAIANKNKDNPKKESVFEYDLIKDKRFTEDKFFFHCPITINFKSSGANKFNDEINLLLKEKANDVHILSIDRGERHLAYYTLVDGKGNIIKQDTFNIIGNDRMKTNYHDKLAAIEKDRDSARKDWKKINNIKEMKEGYLSQVVHEIAKLVIEYNAIVVFEDLNFGFKRGRFKVEKQVYQKLEKMLIEKLNYLVFKDNEFDKTGGVLRAYQLTAPFETFKKMGKQTGIIYYVPAGFTSKICPVTGFVNQLYPKYESVSKSQEFFSKFDKICYNLDKGYFEFSFDYKNFGDKAAKGKWTIASFGSRLINFRNSDKNHNWDTREVYPTKELEKLLKDYSIEYGHGECIKAAICGESDKKFFAKLTSVLNTILQMRNSKTGTELDYLISPVADVNGNFFDSRQAPKNMPQDADANGAYHIGLKGLMLLGRIKNNQEGKKLNLVIKNEEYFEFVQNRNN

SEQ ID NO: 74 - protein, 1300 aa, Francisella novicida
MSIYQEFVNKYSLSKTLRFELIPQGKTLENIKARGLILDDEKRAKDYKKAKQIIDKYHQFFIEEILSSVCISEDLLQNYSDVYFKLKKSDDDNLQKDFKSAKDTIKKQISEYIKDSEKFKNLFNQNLIDAKKGQESDLILWLKQSKDNGIELFKANSDITDIDEALEIIKSFKGWTTYFKGFHENRKNVYSSNDIPTSIIYRIVDDNLPKFLENKAKYESLKDKAPEAINYEQIKKDLAEELTFDIDYKTSEVNQRVFSLDEVFEIANFNNYLNQSGITKFNTIIGGKFVNGENTKRKGINEYINLYSQQINDKTLKKYKMSVLFKQILSDTESKSFVIDKLEDDSDVVTTMQSFYEQIAAFKTVEEKSIKETLSLLFDDLKAQKLDLSKIYFKNDKSLTDLSQQVFDDYSVIGTAVLEYITQQIAPKNLDNPSKKEQELIAKKTEKAKYLSLETIKLALEEFNKHRDIDKQCRFEEILANFAAIPMIFDEIAQNKDNLAQISIKYQNQGKKDLLQASAEDDVKAIKDLLDQTNNLLHKLKIFHISQSEDKANILDKDEHFYLVFEECYFELANIVPLYNKIRNYITQKPYSDEKFKLNFENSTLANGWDKNKEPDNTAILFIKDDKYYLGVMNKKNNKIFDDKAIKENKGEGYKKIVYKLLPGANKMLPKVFFSAKSIKFYNPSEDILRIRNHSTHTKNGSPQKGYEKFEFNIEDCRKFIDFYKQSISKHPEWKDFGFRFSDTQRYNSIDEFYREVENQGYKLTFENISESYIDSVVNQGKLYLFQIYNKDFSAYSKGRPNLHTLYWKALFDERNLQDVVYKLNGEAELFYRKQSIPKKITHPAKEAIANKNKDNPKKESVFEYDLIKDKRFTEDKFFFHCPITINFKSSGANKFNDEINLLLKEKANDVHILSIARGERHLAYYTLVDGKGNIIKQDTFNIIGNDRMKTNYHDKLAAIEKDRDSARKDWKKINNIKEMKEGYLSQVVHEIAKLVIEYNAIVVFEDLNFGFKRGRFKVEKQVYQKLEKMLIEKLNYLVFKDNEFDKTGGVLRAYQLTAPFETFKKMGKQTGIIYYVPAGFTSKICPVTGFVNQLYPKYESVSKSQEFFSKFDKICYNLDKGYFEFSFDYKNFGDKAAKGKWTIASFGSRLINFRNSDKNHNWDTREVYPTKELEKLLKDYSIEYGHGECIKAAICGESDKKFFAKLTSVLNTILQMRNSKTGTELDYLISPVADVNGNFFDSRQAPKNMPQDADANGAYHIGLKGLMLLGRIKNNQEGKKLNLVIKNEEYFEFVQNRNN

SEQ ID NO: 75 - protein, 1300 aa, Francisella novicida
MSIYQEFVNKYSLSKTLRFELIPQGKTLENIKARGLILDDEKRAKDYKKAKQIIDKYHQFFIEEILSSVCISEDLLQNYSDVYFKLKKSDDDNLQKDFKSAKDTIKKQISEYIKDSEKFKNLFNQNLIDAKKGQESDLILWLKQSKDNGIELFKANSDITDIDEALEIIKSFKGWTTYFKGFHENRKNVYSSNDIPTSIIYRIVDDNLPKFLENKAKYESLKDKAPEAINYEQIKKDLAEELTFDIDYKTSEVNQRVFSLDEVFEIANFNNYLNQSGITKFNTIIGGKFVNGENTKRKGINEYINLYSQQINDKTLKKYKMSVLFKQILSDTESKSFVIDKLEDDSDVVTTMQSFYEQIAAFKTVEEKSIKETLSLLFDDLKAQKLDLSKIYFKNDKSLTDLSQQVFDDYSVIGTAVLEYITQQIAPKNLDNPSKKEQELIAKKTEKAKYLSLETIKLALEEFNKHRDIDKQCRFEEILANFAAIPMIFDEIAQNKDNLAQISIKYQNQGKKDLLQASAEDDVKAIKDLLDQTNNLLHKLKIFHISQSEDKANILDKDEHFYLVFEECYFELANIVPLYNKIRNYITQKPYSDEKFKLNFENSTLANGWDKNKEPDNTAILFIKDDKYYLGVMNKKNNKIFDDKAIKENKGEGYKKIVYKLLPGANKMLPKVFFSAKSIKFYNPSEDILRIRNHSTHTKNGSPQKGYEKFEFNIEDCRKFIDFYKQSISKHPEWKDFGFRFSDTQRYNSIDEFYREVENQGYKLTFENISESYIDSVVNQGKLYLFQIYNKDFSAYSKGRPNLHTLYWKALFDERNLQDVVYKLNGEAELFYRKQSIPKKITHPAKEAIANKNKDNPKKESVFEYDLIKDKRFTEDKFFFHCPITINFKSSGANKFNDEINLLLKEKANDVHILSIDRGERHLAYYTLVDGKGNIIKQDTFNIIGNDRMKTNYHDKLAAIEKDRDSARKDWKKINNIKEMKEGYLSQVVHEIAKLVIEYNAIVVFADLNFGFKRGRFKVEKQVYQKLEKMLIEKLNYLVFKDNEFDKTGGVLRAYQLTAPFETFKKMGKQTGIIYYVPAGFTSKICPVTGFVNQLYPKYESVSKSQEFFSKFDKICYNLDKGYFEFSFDYKNFGDKAAKGKWTIASFGSRLINFRNSDKNHNWDTREVYPTKELEKLLKDYSIEYGHGECIKAAICGESDKKFFAKLTSVLNTILQMRNSKTGTELDYLISPVADVNGNFFDSRQAPKNMPQDADANGAYHIGLKGLMLLGRIKNNQEGKKLNLVIKNEEYFEFVQNRNN

SEQ ID NO: 76 - protein, 1300 aa, Francisella novicida
MSIYQEFVNKYSLSKTLRFELIPQGKTLENIKARGLILDDEKRAKDYKKAKQIIDKYHQFFIEEILSSVCISEDLLQNYSDVYFKLKKSDDDNLQKDFKSAKDTIKKQISEYIKDSEKFKNLFNQNLIDAKKGQESDLILWLKQSKDNGIELFKANSDITDIDEALEIIKSFKGWTTYFKGFHENRKNVYSSNDIPTSIIYRIVDDNLPKFLENKAKYESLKDKAPEAINYEQIKKDLAEELTFDIDYKTSEVNQRVFSLDEVFEIANFNNYLNQSGITKFNTIIGGKFVNGENTKRKGINEYINLYSQQINDKTLKKYKMSVLFKQILSDTESKSFVIDKLEDDSDVVTTMQSFYEQIAAFKTVEEKSIKETLSLLFDDLKAQKLDLSKIYFKNDKSLTDLSQQVFDDYSVIGTAVLEYITQQIAPKNLDNPSKKEQELIAKKTEKAKYLSLETIKLALEEFNKHRDIDKQCRFEEILANFAAIPMIFDEIAQNKDNLAQISIKYQNQGKKDLLQASAEDDVKAIKDLLDQTNNLLHKLKIFHISQSEDKANILDKDEHFYLVFEECYFELANIVPLYNKIRNYITQKPYSDEKFKLNFENSTLANGWDKNKEPDNTAILFIKDDKYYLGVMNKKNNKIFDDKAIKENKGEGYKKIVYKLLPGANKMLPKVFFSAKSIKFYNPSEDILRIRNHSTHTKNGSPQKGYEKFEFNIEDCRKFIDFYKQSISKHPEWKDFGFRFSDTQRYNSIDEFYREVENQGYKLTFENISESYIDSVVNQGKLYLFQIYNKDFSAYSKGRPNLHTLYWKALFDERNLQDVVYKLNGEAELFYRKQSIPKKITHPAKEAIANKNKDNPKKESVFEYDLIKDKRFTEDKFFFHCPITINFKSSGANKFNDEINLLLKEKANDVHILSIDRGERHLAYYTLVDGKGNIIKQDTFNIIGNDRMKTNYHDKLAAIEKDRDSARKDWKKINNIKEMKEGYLSQVVHEIAKLVIEYNAIVVFEDLNFGFKRGRFKVEKQVYQKLEKMLIEKLNYLVFKDNEFDKTGGVLRAYQLTAPFETFKKMGKQTGIIYYVPAGFTSKICPVTGFVNQLYPKYESVSKSQEFFSKFDKICYNLDKGYFEFSFDYKNFGDKAAKGKWTIASFGSRLINFRNSDKNHNWDTREVYPTKELEKLLKDYSIEYGHGECIKAAICGESDKKFFAKLTSVLNTILQMRNSKTGTELDYLISPVADVNGNFFDSRQAPKNMPQDAAANGAYHIGLKGLMLLGRIKNNQEGKKLNLVIKNEEYFEFVQNRNN

SEQ ID NO: 77 - protein, 1300 aa, Francisella novicida
MSIYQEFVNKYSLSKTLRFELIPQGKTLENIKARGLILDDEKRAKDYKKAKQIIDKYHQFFIEEILSSVCISEDLLQNYSDVYFKLKKSDDDNLQKDFKSAKDTIKKQISEYIKDSEKFKNLFNQNLIDAKKGQESDLILWLKQSKDNGIELFKANSDITDIDEALEIIKSFKGWTTYFKGFHENRKNVYSSNDIPTSIIYRIVDDNLPKFLENKAKYESLKDKAPEAINYEQIKKDLAEELTFDIDYKTSEVNQRVFSLDEVFEIANFNNYLNQSGITKFNTIIGGKFVNGENTKRKGINEYINLYSQQINDKTLKKYKMSVLFKQILSDTESKSFVIDKLEDDSDVVTTMQSFYEQIAAFKTVEEKSIKETLSLLFDDLKAQKLDLSKIYFKNDKSLTDLSQQVFDDYSVIGTAVLEYITQQIAPKNLDNPSKKEQELIAKKTEKAKYLSLETIKLALEEFNKHRDIDKQCRFEEILANFAAIPMIFDEIAQNKDNLAQISIKYQNQGKKDLLQASAEDDVKAIKDLLDQTNNLLHKLKIFHISQSEDKANILDKDEHFYLVFEECYFELANIVPLYNKIRNYITQKPYSDEKFKLNFENSTLANGWDKNKEPDNTAILFIKDDKYYLGVMNKKNNKIFDDKAIKENKGEGYKKIVYKLLPGANKMLPKVFFSAKSIKFYNPSEDILRIRNHSTHTKNGSPQKGYEKFEFNIEDCRKFIDFYKQSISKHPEWKDFGFRFSDTQRYNSIDEFYREVENQGYKLTFENISESYIDSVVNQGKLYLFQIYNKDFSAYSKGRPNLHTLYWKALFDERNLQDVVYKLNGEAELFYRKQSIPKKITHPAKEAIANKNKDNPKKESVFEYDLIKDKRFTEDKFFFHCPITINFKSSGANKFNDEINLLLKEKANDVHILSIARGERHLAYYTLVDGKGNIIKQDTFNIIGNDRMKTNYHDKLAAIEKDRDSARKDWKKINNIKEMKEGYLSQVVHEIAKLVIEYNAIVVFADLNFGFKRGRFKVEKQVYQKLEKMLIEKLNYLVFKDNEFDKTGGVLRAYQLTAPFETFKKMGKQTGIIYYVPAGFTSKICPVTGFVNQLYPKYESVSKSQEFFSKFDKICYNLDKGYFEFSFDYKNFGDKAAKGKWTIASFGSRLINFRNSDKNHNWDTREVYPTKELEKLLKDYSIEYGHGECIKAAICGESDKKFFAKLTSVLNTILQMRNSKTGTELDYLISPVADVNGNFFDSRQAPKNMPQDADANGAYHIGLKGLMLLGRIKNNQEGKKLNLVIKNEEYFEFVQNRNN

SEQ ID NO: 78 - protein, 1300 aa, Francisella novicida
MSIYQEFVNKYSLSKTLRFELIPQGKTLENIKARGLILDDEKRAKDYKKAKQIIDKYHQFFIEEILSSVCISEDLLQNYSDVYFKLKKSDDDNLQKDFKSAKDTIKKQISEYIKDSEKFKNLFNQNLIDAKKGQESDLILWLKQSKDNGIELFKANSDITDIDEALEIIKSFKGWTTYFKGFHENRKNVYSSNDIPTSIIYRIVDDNLPKFLENKAKYESLKDKAPEAINYEQIKKDLAEELTFDIDYKTSEVNQRVFSLDEVFEIANFNNYLNQSGITKFNTIIGGKFVNGENTKRKGINEYINLYSQQINDKTLKKYKMSVLFKQILSDTESKSFVIDKLEDDSDVVTTMQSFYEQIAAFKTVEEKSIKETLSLLFDDLKAQKLDLSKIYFKNDKSLTDLSQQVFDDYSVIGTAVLEYITQQIAPKNLDNPSKKEQELIAKKTEKAKYLSLETIKLALEEFNKHRDIDKQCRFEEILANFAAIPMIFDEIAQNKDNLAQISIKYQNQGKKDLLQASAEDDVKAIKDLLDQTNNLLHKLKIFHISQSEDKANILDKDEHFYLVFEECYFELANIVPLYNKIRNYITQKPYSDEKFKLNFENSTLANGWDKNKEPDNTAILFIKDDKYYLGVMNKKNNKIFDDKAIKENKGEGYKKIVYKLLPGANKMLPKVFFSAKSIKFYNPSEDILRIRNHSTHTKNGSPQKGYEKFEFNIEDCRKFIDFYKQSISKHPEWKDFGFRFSDTQRYNSIDEFYREVENQGYKLTFENISESYIDSVVNQGKLYLFQIYNKDFSAYSKGRPNLHTLYWKALFDERNLQDVVYKLNGEAELFYRKQSIPKKITHPAKEAIANKNKDNPKKESVFEYDLIKDKRFTEDKFFFHCPITINFKSSGANKFNDEINLLLKEKANDVHILSIARGERHLAYYTLVDGKGNIIKQDTFNIIGNDRMKTNYHDKLAAIEKDRDSARKDWKKINNIKEMKEGYLSQVVHEIAKLVIEYNAIVVFEDLNFGFKRGRFKVEKQVYQKLEKMLIEKLNYLVFKDNEFDKTGGVLRAYQLTAPFETFKKMGKQTGIIYYVPAGFTSKICPVTGFVNQLYPKYESVSKSQEFFSKFDKICYNLDKGYFEFSFDYKNFGDKAAKGKWTIASFGSRLINFRNSDKNHNWDTREVYPTKELEKLLKDYSIEYGHGECIKAAICGESDKKFFAKLTSVLNTILQMRNSKTGTELDYLISPVADVNGNFFDSRQAPKNMPQDAAANGAYHIGLKGLMLLGRIKNNQEGKKLNLVIKNEEYFEFVQNRNN

SEQ ID NO: 79 - protein, 1300 aa, Francisella novicida
MSIYQEFVNKYSLSKTLRFELIPQGKTLENIKARGLILDDEKRAKDYKKAKQIIDKYHQFFIEEILSSVCISEDLLQNYSDVYFKLKKSDDDNLQKDFKSAKDTIKKQISEYIKDSEKFKNLFNQNLIDAKKGQESDLILWLKQSKDNGIELFKANSDITDIDEALEIIKSFKGWTTYFKGFHENRKNVYSSNDIPTSIIYRIVDDNLPKFLENKAKYESLKDKAPEAINYEQIKKDLAEELTFDIDYKTSEVNQRVFSLDEVFEIANFNNYLNQSGITKFNTIIGGKFVNGENTKRKGINEYINLYSQQINDKTLKKYKMSVLFKQILSDTESKSFVIDKLEDDSDVVTTMQSFYEQIAAFKTVEEKSIKETLSLLFDDLKAQKLDLSKIYFKNDKSLTDLSQQVFDDYSVIGTAVLEYITQQIAPKNLDNPSKKEQELIAKKTEKAKYLSLETIKLALEEFNKHRDIDKQCRFEEILANFAAIPMIFDEIAQNKDNLAQISIKYQNQGKKDLLQASAEDDVKAIKDLLDQTNNLLHKLKIFHISQSEDKANILDKDEHFYLVFEECYFELANIVPLYNKIRNYITQKPYSDEKFKLNFENSTLANGWDKNKEPDNTAILFIKDDKYYLGVMNKKNNKIFDDKAIKENKGEGYKKIVYKLLPGANKMLPKVFFSAKSIKFYNPSEDILRIRNHSTHTKNGSPQKGYEKFEFNIEDCRKFIDFYKQSISKHPEWKDFGFRFSDTQRYNSIDEFYREVENQGYKLTFENISESYIDSVVNQGKLYLFQIYNKDFSAYSKGRPNLHTLYWKALFDERNLQDVVYKLNGEAELFYRKQSIPKKITHPAKEAIANKNKDNPKKESVFEYDLIKDKRFTEDKFFFHCPITINFKSSGANKFNDEINLLLKEKANDVHILSIDRGERHLAYYTLVDGKGNIIKQDTFNIIGNDRMKTNYHDKLAAIEKDRDSARKDWKKINNIKEMKEGYLSQVVHEIAKLVIEYNAIVVFADLNFGFKRGRFKVEKQVYQKLEKMLIEKLNYLVFKDNEFDKTGGVLRAYQLTAPFETFKKMGKQTGIIYYVPAGFTSKICPVTGFVNQLYPKYESVSKSQEFFSKFDKICYNLDKGYFEFSFDYKNFGDKAAKGKWTIASFGSRLINFRNSDKNHNWDTREVYPTKELEKLLKDYSIEYGHGECIKAAICGESDKKFFAKLTSVLNTILQMRNSKTGTELDYLISPVADVNGNFFDSRQAPKNMPQDAAANGAYHIGLKGLMLLGRIKNNQEGKKLNLVIKNEEYFEFVQNRNN

SEQ ID NO: 80 - protein, 1300 aa, Francisella novicida
MSIYQEFVNKYSLSKTLRFELIPQGKTLENIKARGLILDDEKRAKDYKKAKQIIDKYHQFFIEEILSSVCISEDLLQNYSDVYFKLKKSDDDNLQKDFKSAKDTIKKQISEYIKDSEKFKNLFNQNLIDAKKGQESDLILWLKQSKDNGIELFKANSDITDIDEALEIIKSFKGWTTYFKGFHENRKNVYSSNDIPTSIIYRIVDDNLPKFLENKAKYESLKDKAPEAINYEQIKKDLAEELTFDIDYKTSEVNQRVFSLDEVFEIANFNNYLNQSGITKFNTIIGGKFVNGENTKRKGINEYINLYSQQINDKTLKKYKMSVLFKQILSDTESKSFVIDKLEDDSDVVTTMQSFYEQIAAFKTVEEKSIKETLSLLFDDLKAQKLDLSKIYFKNDKSLTDLSQQVFDDYSVIGTAVLEYITQQIAPKNLDNPSKKEQELIAKKTEKAKYLSLETIKLALEEFNKHRDIDKQCRFEEILANFAAIPMIFDEIAQNKDNLAQISIKYQNQGKKDLLQASAEDDVKAIKDLLDQTNNLLHKLKIFHISQSEDKANILDKDEHFYLVFEECYFELANIVPLYNKIRNYITQKPYSDEKFKLNFENSTLANGWDKNKEPDNTAILFIKDDKYYLGVMNKKNNKIFDDKAIKENKGEGYKKIVYKLLPGANKMLPKVFFSAKSIKFYNPSEDILRIRNHSTHTKNGSPQKGYEKFEFNIEDCRKFIDFYKQSISKHPEWKDFGFRFSDTQRYNSIDEFYREVENQGYKLTFENISESYIDSVVNQGKLYLFQIYNKDFSAYSKGRPNLHTLYWKALFDERNLQDVVYKLNGEAELFYRKQSIPKKITHPAKEAIANKNKDNPKKESVFEYDLIKDKRFTEDKFFFHCPITINFKSSGANKFNDEINLLLKEKANDVHILSIARGERHLAYYTLVDGKGNIIKQDTFNIIGNDRMKTNYHDKLAAIEKDRDSARKDWKKINNIKEMKEGYLSQVVHEIAKLVIEYNAIVVFADLNFGFKRGRFKVEKQVYQKLEKMLIEKLNYLVFKDNEFDKTGGVLRAYQLTAPFETFKKMGKQTGIIYYVPAGFTSKICPVTGFVNQLYPKYESVSKSQEFFSKFDKICYNLDKGYFEFSFDYKNFGDKAAKGKWTIASFGSRLINFRNSDKNHNWDTREVYPTKELEKLLKDYSIEYGHGECIKAAICGESDKKFFAKLTSVLNTILQMRNSKTGTELDYLISPVADVNGNFFDSRQAPKNMPQDAAANGAYHIGLKGLMLLGRIKNNQEGKKLNLVIKNEEYFEFVQNRNN

SEQ ID NO: 81 - protein, 1052 aa, Staphylococcus aureus
KRNYILGLDIGITSVGYGIIDYETRDVIDAGVRLFKEANVENNEGRRSKRGARRLKRRRRHRIQRVKKLLFDYNLLTDHSELSGINPYEARVKGLSQKLSEEEFSAALLHLAKRRGVHNVNEVEEDTGNELSTKEQISRNSKALEEKYVAELQLERLKKDGEVRGSINRFKTSDYVKEAKQLLKVQKAYHQLDQSFIDTYIDLLETRRTYYEGPGEGSPFGWKDIKEWYEMLMGHCTYFPEELRSVKYAYNADLYNALNDLNNLVITRDENEKLEYYEKFQIIENVFKQKKKPTLKQIAKEILVNEEDIKGYRVTSTGKPEFTNLKVYHDIKDITARKEIIENAELLDQIAKILTIYQSSEDIQEELTNLNSELTQEEIEQISNLKGYTGTHNLSLKAINLILDELWHTNDNQIAIFNRLKLVPKKVDLSQQKEIPTTLVDDFILSPVVKRSFIQSIKVINAIIKKYGLPNDIIIELAREKNSKDAQKMINEMQKRNRQTNERIEEIIRTTGKENAKYLIEKIKLHDMQEGKCLYSLEAIPLEDLLNNPFNYEVDHIIPRSVSFDNSFNNKVLVKQEENSKKGNRTPFQYLSSSDSKISYETFKKHILNLAKGKGRISKTKKEYLLEERDINRFSVQKDFINRNLVDTRYATRGLMNLLRSYFRVNNLDVKVKSINGGFTSFLRRKWKFKKERNKGYKHHAEDALIIANADFIFKEWKKLDKAKKVMENQMFEEKQAESMPEIETEQEYKEIFITPHQIKHIKDFKDYKYSHRVDKKPNRELINDTLYSTRKDDKGNTLIVNNLNGLYDKDNDKLKKLINKSPEKLLMYHHDPQTYQKLKLIMEQYGDEKNPLYKYYEETGNYLTKYSKKDNGPVIKKIKYYGNKLNAHLDITDDYPNSRNKVVKLSLKPYRFDVYLDNGVYKFVTVKNLDVIKKENYYEVNSKCYEEAKKLKKISNQAEFIASFYNNDLIKINGELYRVIGVNNDLLNRIEVNMIDITYREYLENMNDKRPPRIIKTIASKTQSIKKYSTDILGNLYEVKSKKHPQIIKKG

SEQ ID NO: 82 - protein, 1052 aa, Staphylococcus aureus
KRNYILGLDIGITSVGYGIIDYETRDVIDAGVRLFKEANVENNEGRRSKRGARRLKRRRRHRIQRVKKLLFDYNLLTDHSELSGINPYEARVKGLSQKLSEEEFSAALLHLAKRRGVHNVNEVEEDTGNELSTKEQISRNSKALEEKYVAELQLERLKKDGEVRGSINRFKTSDYVKEAKQLLKVQKAYHQLDQSFIDTYIDLLETRRTYYEGPGEGSPFGWKDIKEWYEMLMGHCTYFPEELRSVKYAYNADLYNALNDLNNLVITRDENEKLEYYEKFQIIENVFKQKKKPTLKQIAKEILVNEEDIKGYRVTSTGKPEFTNLKVYHDIKDITARKEIIENAELLDQIAKILTIYQSSEDIQEELTNLNSELTQEEIEQISNLKGYTGTHNLSLKAINLILDELWHTNDNQIAIFNRLKLVPKKVDLSQQKEIPTTLVDDFILSPVVKRSFIQSIKVINAIIKKYGLPNDIIIELAREKNSKDAQKMINEMQKRNRQTNERIEEIIRTTGKENAKYLIEKIKLHDMQEGKCLYSLEAIPLEDLLNNPFNYEVDHIIPRSVSFDNSFNNKVLVKQEEASKKGNRTPFQYLSSSDSKISYETFKKHILNLAKGKGRISKTKKEYLLEERDINRFSVQKDFINRNLVDTRYATRGLMNLLRSYFRVNNLDVKVKSINGGFTSFLRRKWKFKKERNKGYKHHAEDALIIANADFIFKEWKKLDKAKKVMENQMFEEKQAESMPEIETEQEYKEIFITPHQIKHIKDFKDYKYSHRVDKKPNRELINDTLYSTRKDDKGNTLIVNNLNGLYDKDNDKLKKLINKSPEKLLMYHHDPQTYQKLKLIMEQYGDEKNPLYKYYEETGNYLTKYSKKDNGPVIKKIKYYGNKLNAHLDITDDYPNSRNKVVKLSLKPYRFDVYLDNGVYKFVTVKNLDVIKKENYYEVNSKCYEEAKKLKKISNQAEFIASFYNNDLIKINGELYRVIGVNNDLLNRIEVNMIDITYREYLENMNDKRPPRIIKTIASKTQSIKKYSTDILGNLYEVKSKKHPQIIKKG

SEQ ID NO: 83 - protein, 1052 aa, Staphylococcus aureus
KRNYILGLDIGITSVGYGIIDYETRDVIDAGVRLFKEANVENNEGRRSKRGARRLKRRRRHRIQRVKKLLFDYNLLTDHSELSGINPYEARVKGLSQKLSEEEFSAALLHLAKRRGVHNVNEVEEDTGNELSTKEQISRNSKALEEKYVAELQLERLKKDGEVRGSINRFKTSDYVKEAKQLLKVQKAYHQLDQSFIDTYIDLLETRRTYYEGPGEGSPFGWKDIKEWYEMLMGHCTYFPEELRSVKYAYNADLYNALNDLNNLVITRDENEKLEYYEKFQIIENVFKQKKKPTLKQIAKEILVNEEDIKGYRVTSTGKPEFTNLKVYHDIKDITARKEIIENAELLDQIAKILTIYQSSEDIQEELTNLNSELTQEEIEQISNLKGYTGTHNLSLKAINLILDELWHTNDNQIAIFNRLKLVPKKVDLSQQKEIPTTLVDDFILSPVVKRSFIQSIKVINAIIKKYGLPNDIIIELAREKNSKDAQKMINEMQKRNRQTNERIEEIIRTTGKENAKYLIEKIKLHDMQEGKCLYSLEAIPLEDLLNNPFNYEVDHIIPRSVSFDNSFNNKVLVKQEEASKKGNRTPFQYLSSSDSKISYETFKKHILNLAKGKGRISKTKKEYLLEERDINRFSVQKDFINRNLVDTRYATRGLMNLLRSYFRVNNLDVKVKSINGGFTSFLRRKWKFKKERNKGYKHHAEDALIIANADFIFKEWKKLDKAKKVMENQMFEEKQAESMPEIETEQEYKEIFITPHQIKHIKDFKDYKYSHRVDKKPNRKLINDTLYSTRKDDKGNTLIVNNLNGLYDKDNDKLKKLINKSPEKLLMYHHDPQTYQKLKLIMEQYGDEKNPLYKYYEETGNYLTKYSKKDNGPVIKKIKYYGNKLNAHLDITDDYPNSRNKVVKLSLKPYRFDVYLDNGVYKFVTVKNLDVIKKENYYEVNSKCYEEAKKLKKISNQAEFIASFYKNDLIKINGELYRVIGVNNDLLNRIEVNMIDITYREYLENMNDKRPPHIIKTIASKTQSIKKYSTDILGNLYEVKSKKHPQIIKKG

SEQ ID NO: 84 - protein, 1129 aa, Alicyclobacillus acidiphilus
MAVKSMKVKLRLDNMPEIRAGLWKLHTEVNAGVRYYTEWLSLLRQENLYRRSPNGDGEQECYKTAEECKAELLERLRARQVENGHCGPAGSDDELLQLARQLYELLVPQAIGAKGDAQQIARKFLSPLADKDAVGGLGIAKAGNKPRWVRMREAGEPGWEEEKAKAEARKSTDRTADVLRALADFGLKPLMRVYTDSDMSSVQWKPLRKGQAVRTWDRDMFQQAIERMMSWESWNQRVGEAYAKLVEQKSRFEQKNFVGQEHLVQLVNQLQQDMKEASHGLESKEQTAHYLTGRALRGSDKVFEKWEKLDPDAPFDLYDTEIKNVQRRNTRRFGSHDLFAKLAEPKYQALWREDASFLTRYAVYNSIVRKLNHAKMFATFTLPDATAHPIWTRFDKLGGNLHQYTFLFNEFGEGRHAIRFQKLLTVEDGVAKEVDDVTVPISMSAQLDDLLPRDPHELVALYFQDYGAEQHLAGEFGGAKIQYRRDQLNHLHARRGARDVYLNLSVRVQSQSEARGERRPPYAAVFRLVGDNHRAFVHFDKLSDYLAEHPDDGKLGSEGLLSGLRVMSVDLGLRTSASISVFRVARKDELKPNSEGRVPFCFPIEGNENLVAVHERSQLLKLPGETESKDLRAIREERQRTLRQLRTQLAYLRLLVRCGSEDVGRRERSWAKLIEQPMDANQMTPDWREAFEDELQKLKSLYGICGDREWTEAVYESVRRVWRHMGKQVRDWRKDVRSGERPKIRGYQKDVVGGNSIEQIEYLERQYKFLKSWSFFGKVSGQVIRAEKGSRFAITLREHIDHAKEDRLKKLADRIIMEALGYVYALDDERGKGKWVAKYPPCQLILLEELSEYQFNNDRPPSENNQLMQWSHRGVFQELLNQAQVHDLLVGTMYAAFSSRFDARTGAPGIRCRRVPARCAREQNPEPFPWWLNKFVAEHKLDGCPLRADDLIPTGEGEFFVSPFSAEEGDFHQIHADLNAAQNLQRRLWSDFDISQIRLRCDWGEVDGEPVLIPRTTGKRTADSYGNKVFYTKTGVTYYERERGKKRRKVFAQEELSEEEAELLVEADEAREKSVVLMRDPSGIINRGDWTRQKEFWSMVNQRIEGYLVKQIRSRVRLQESACENTGDI

SEQ ID NO: 85 - RNA, 120 nt, Artificial Sequence
  Description of Artificial Sequence: Synthetic polynucleotide
aaaaaaaaaaaaaaaaaaaaaaaaaaaaaaaaaaaaaaaaaaaaaaaaaaaaaaaaaaaaaaaaaaaaaaaaaaaaaaaaaaaaaaaaaaaaaaaaaaaaaaaaaaaaaaaaaaaaaaaa

SEQ ID NO: 86 - DNA, 47 bp, Artificial Sequence
  Description of Artificial Sequence: Synthetic oligonucleotide
gggaaataagagagaaaagaagagtaagaagaaatataagagccacc

SEQ ID NO: 87 - DNA, 101 bp, Artificial Sequence
  Description of Artificial Sequence: Synthetic polynucleotide
gctggagcctcggtggccatgcttcttgccccttgggcctccccccagcccctcctccccttcctgcacccgtacccccgtggtctttgaataaagtctga

SEQ ID NO: 88 - DNA, 3420 bp, Artificial Sequence
  Description of Artificial Sequence: Synthetic polynucleotide
atggccccaaagaagaagcggaaggtcggtatccacggagtcccagcagccgccaccagatccttcatcctgaagatcgagcccaacgaggaagtgaagaaaggcctctggaaaacccacgaggtgctgaaccacggaatcgcctactacatgaatatcctgaagctgatccggcaagaggccatctacgagcaccacgagcaggaccccaagaatcccaagaaggtgtccaaggccgagatccaggccgagctgtgggatttcgtgctgaagatgcagaagtgcaacagcttcacacacgaggtggacaaggacgaggtgttcaacatcctgagagagctgtacgaggaactggtgcccagcagcgtggaaaagaagggcgaagccaaccagctgagcaacaagtttctgtaccctctggtggaccccaacagccagtctggaaagggaacagccagcagcggcagaaagcccagatggtacaacctgaagattgccggcgatccctcctgggaagaagagaagaagaagtgggaagaagataagaaaaaggacccgctggccaagatcctgggcaagctggctgagtacggactgatccctctgttcatcccctacaccgacagcaacgagcccatcgtgaaagaaatcaagtggatggaaaagtcccggaaccagagcgtgcggcggctggataaggacatgttcattcaggccctggaacggttcctgagctgggagagctggaacctgaaagtgaaagaggaatacgagaaggtcgagaaagagtacaagaccctggaagagaggatcaaagaggacatccaggctctgaaggctctggaacagtatgagaaagagcggcaagaacagctgctgcgggacaccctgaacaccaacgagtaccggctgagcaagagaggccttagaggctggcgggaaatcatccagaaatggctgaaaatggacgagaacgagccctccgagaagtacctggaagtgttcaaggactaccagcggaagcaccctagagaggccggcgattacagcgtgtacgagttcctgtccaagaaagagaaccacttcatctggcggaatcaccctgagtacccctacctgtacgccaccttctgcgagatcgacaagaaaaagaaggacgccaagcagcaggccaccttcacactggccgatcctatcaatcaccctctgtgggtccgattcgaggaaagaagcggcagcaacctgaacaagtacagaatcctgaccgagcagctgcacaccgagaagctgaagaaaaagctgacagtgcagctggaccggctgatctaccctacagaatctggcggctgggaagagaagggcaaagtggacattgtgctgctgcccagccggcagttctacaaccagatcttcctggacatcgaggaaaagggcaagcacgccttcacctacaaggatgagagcatcaagttccctctgaagggcacactcggcggagccagagtgcagttcgacagagatcacctgagaagataccctcacaaggtggaaagcggcaacgtgggcagaatctacttcaacatgaccgtgaacatcgagcctacagagtccccagtgtccaagtctctgaagatccaccgggacgacttccccaaggtggtcaacttcaagcccaaagaactgaccgagtggatcaaggacagcaagggcaagaaactgaagtccggcatcgagtccctggaaatcggcctgagagtgatgagcatcgacctgggacagagacaggccgctgccgcctctattttcgaggtggtggatcagaagcccgacatcgaaggcaagctgtttttcccaatcaagggcaccgagctgtatgccgtgcacagagccagcttcaacatcaagctgcccggcgagacactggtcaagagcagagaagtgctgcggaaggccagagaggacaatctgaaactgatgaaccagaagctcaacttcctgcggaacgtgctgcacttccagcagttcgaggacatcaccgagagagagaagcgggtcaccaagtggatcagcagacaagagaacagcgacgtgcccctggtgtaccaggatgagctgatccagatccgcgagctgatgtacaagccttacaaggactgggtcgccttcctgaagcagctccacaagagactggaagtcgagatcggcaaagaagtgaagcactggcggaagtccctgagcgacggaagaaagggcctgtacggcatctccctgaagaacatcgacgagatcgatcggacccggaagttcctgctgagatggtccctgaggcctaccgaacctggcgaagtgcgtagactggaacccggccagagattcgccatcgaccagctgaatcacctgaacgccctgaaagaagatcggctgaagaagatggccaacaccatcatcatgcacgccctgggctactgctacgacgtgcggaagaagaaatggcaggctaagaaccccgcctgccagatcatcctgttcgaggatctgagcaactacaacccctacgaggaaaggtcccgcttcgagaacagcaagctcatgaagtggtccagacgcgagatccccagacaggttgcactgcagggcgagatctatggcctgcaagtgggagaagtgggcgctcagttcagcagcagattccacgccaagacaggcagccctggcatcagatgtagcgtcgtgaccaaagagaagctgcaggacaatcggttcttcaagaatctgcagagagagggcagactgaccctggacaaaatcgccgtgctgaaagagggcgatctgtacccagacaaaggcggcgagaagttcatcagcctgagcaaggatcggaagtgcgtgaccacacacgccgacatcaacgccgctcagaacctgcagaagcggttctggacaagaacccacggcttctacaaggtgtactgcaaggcctaccaggtggacggccagaccgtgtacatccctgagagcaaggaccagaagcagaagatcatcgaagagttcggcgagggctacttcattctgaaggacggggtgtacgaatgggtcaacgccggcaagctgaaaatcaagaagggcagctccaagcagagcagcagcgagctggtggatagcgacatcctgaaagacagcttcgacctggcctccgagctgaaaggcgaaaagctgatgctgtacagggaccccagcggcaatgtgttccccagcgacaaatggatggccgctggcgtgttcttcggaaagctggaacgcatcctgatcagcaagctgaccaaccagtactccatcagcaccatcgaggacgacagcagcaagcagtctatgaaaaggccggcggccacgaaaaaggccggccaggcaaaaaagaaaaag

SEQ ID NO: 89 - protein, 1112 aa, Bacillus sp.
MAIRSIKLKMKTNSGTDSIYLRKALWRTHQLINEGIAYYMNLLTLYRQEAIGDKTKEAYQAELINIIRNQQRNNGSSEEHGSDQEILALLRQLYELIIPSSIGESGDANQLGNKFLYPLVDPNSQSGKGTSNAGRKPRWKRLKEEGNPDWELEKKKDEERKAKDPTVKIFDNLNKYGLLPLFPLFTNIQKDIEWLPLGKRQSVRKWDKDMFIQAIERLLSWESWNRRVADEYKQLKEKTESYYKEHLTGGEEWIEKIRKFEKERNMELEKNAFAPNDGYFITSRQIRGWDRVYEKWSKLPESASPEELWKVVAEQQNKMSEGFGDPKVFSFLANRENRDIWRGHSERIYHIAAYNGLQKKLSRTKEQATFTLPDAIEHPLWIRYESPGGTNLNLFKLEEKQKKNYYVTLSKIIWPSEEKWIEKENIEIPLAPSIQFNRQIKLKQHVKGKQEISFSDYSSRISLDGVLGGSRIQFNRKYIKNHKELLGEGDIGPVFFNLVVDVAPLQETRNGRLQSPIGKALKVISSDFSKVIDYKPKELMDWMNTGSASNSFGVASLLEGMRVMSIDMGQRTSASVSIFEVVKELPKDQEQKLFYSINDTELFAIHKRSFLLNLPGEVVTKNNKQQRQERRKKRQFVRSQIRMLANVLRLETKKTPDERKKAIHKLMEIVQSYDSWTASQKEVWEKELNLLTNMAAFNDEIWKESLVELHHRIEPYVGQIVSKWRKGLSEGRKNLAGISMWNIDELEDTRRLLISWSKRSRTPGEANRIETDEPFGSSLLQHIQNVKDDRLKQMANLIIMTALGFKYDKEEKDRYKRWKETYPACQIILFENLNRYLFNLDRSRRENSRLMKWAHRSIPRTVSMQGEMFGLQVGDVRSEYSSRFHAKTGAPGIRCHALTEEDLKAGSNTLKRLIEDGFINESELAYLKKGDIIPSQGGELFVTLSKRYKKDSDNNELTVIHADINAAQNLQKRFWQQNSEVYRVPCQLARMGEDKLYIPKSQTETIKKYFGKGSFVKNNTEQEVYKWEKSEKMKIKTDTTFDLQDLDGFEDISKTIELAQEQQKKYLTMFRDPSGYFFNNETWRPQKEYWSIVNNIIKSCLKKKILSNKVEL

SEQ ID NO: 90 - protein, 1108 aa, Bacillus thermoamylovorans
MATRSFILKIEPNEEVKKGLWKTHEVLNHGIAYYMNILKLIRQEAIYEHHEQDPKNPKKVSKAEIQAELWDFVLKMQKCNSFTHEVDKDVVFNILRELYEELVPSSVEKKGEANQLSNKFLYPLVDPNSQSGKGTASSGRKPRWYNLKIAGDPSWEEEKKKWEEDKKKDPLAKILGKLAEYGLIPLFIPFTDSNEPIVKEIKWMEKSRNQSVRRLDKDMFIQALERFLSWESWNLKVKEEYEKVEKEHKTLEERIKEDIQAFKSLEQYEKERQEQLLRDTLNTNEYRLSKRGLRGWREIIQKWLKMDENEPSEKYLEVFKDYQRKHPREAGDYSVYEFLSKKENHFIWRNHPEYPYLYATFCEIDKKKKDAKQQATFTLADPINHPLWVRFEERSGSNLNKYRILTEQLHTEKLKKKLTVQLDRLIYPTESGGWEEKGKVDIVLLPSRQFYNQIFLDIEEKGKHAFTYKDESIKFPLKGTLGGARVQFDRDHLRRYPHKVESGNVGRIYFNMTVNIEPTESPVSKSLKIHRDDFPKFVNFKPKELTEWIKDSKGKKLKSGIESLEIGLRVMSIDLGQRQAAAASIFEVVDQKPDIEGKLFFPIKGTELYAVHRASFNIKLPGETLVKSREVLRKAREDNLKLMNQKLNFLRNVLHFQQFEDITEREKRVTKWISRQENSDVPLVYQDELIQIRELMYKPYKDWVAFLKQLHKRLEVEIGKEVKHWRKSLSDGRKGLYGISLKNIDEIDRTRKFLLRWSLRPTEPGEVRRLEPGQRFAIDQLNHLNALKEDRLKKMANTIIMHALGYCYDVRKKKWQAKNPACQIILFEDLSNYNPYEERSRFENSKLMKWSRREIPRQVALQGEIYGLQVGEVGAQFSSRFHAKTGSPGIRCSVVTKEKLQDNRFFKNLQREGRLTLDKIAVLKEGDLYPDKGGEKFISLSKDRKLVTTHADINAAQNLQKRFWTRTHGFYKVYCKAYQVDGQTVYIPESKDQKQKIIEEFGEGYFILKDGVYEWGNAGKLKIKKGSSKQSSSELVDSDILKDSFDLASELKGEKLMLYRDPSGNVFPSDKWMAAGVFFGKLERILISKLTNQYSISTIEDDSSKQSM

SEQ ID NO: 91 - protein, 1302 aa, Unknown
  Description of Unknown: Cas12c1 sequence
MQTKKTHLHLISAKASRKYRRTIACLSDTAKKDLERRKQSGAADPAQELSCLKTIKFKLEVPEGSKLPSFDRISQIYNALETIEKGSLSYLLFALILSGFRIFPNSSAAKTFASSSCYKNDQFASQIKEIFGEMVKNFIPSELESILKKGRRKNNKDWTEENIKRVLNSEFGRKNSEGSSALFDSFLSKFSQELFRKFDSWNEVNKKYLEAAELLDSMLASYGPFDSVCKMIGDSDSRNSLPDKSTIAFTNNAEITVDIESSVMPYMAIAALLREYRQSKSKAAPVAYVQSHLTTTNGNGLSWFFKFGLDLIRKAPVSSKQSTSDGSKSLQELFSVPDDKLDGLKFIKEACEALPEASLLCGEKGELLGYQDFRTSFAGHIDSWVANYVNRLFELIELVNQLPESIKLPSILTQKNHNLVASLGLQEAEVSHSLELFEGLVKNVRQTLKKLAGIDISSSPNEQDIKEFYAFSDVLNRLGSIRNQIENAVQTAKKDKIDLESAIEWKEWKKLKKLPKLNGLGGGVPKQQELLDKALESVKQIRHYQRIDFERVIQWAVNEHCLETVPKFLVDAEKKKINKESSTDFAAKENAVRFLLEGIGAAARGKTDSVSKAAYNWFVVNNFLAKKDLNRYFINCQGCIYKPPYSKRRSLAFALRSDNKDTIEVVWEKFETFYKEISKEIEKFNIFSQEFQTFLHLENLRMKLLLRRIQKPIPAEIAFFSLPQEYYDSLPPNVAFLALNQEITPSEYITQFNLYSSFLNGNLILLRRSRSYLRAKFSWVGNSKLIYAAKEARLWKIPNAYWKSDEWKMILDSNVLVFDKAGNVLPAPTLKKVCEREGDLRLFYPLLRQLPHDWCYRNPFVKSVGREKNVIEVNKEGEPKVASALPGSLFRLIGPAPFKSLLDDCFFNPLDKDLRECMLIVDQEISQKVEAQKVEASLESCTYSIAVPIRYHLEEPKVSNQFENVLAIDQGEAGLAYAVFSLKSIGEAETKPIAVGTIRIPSIRRLIHSVSTYRKKKQRLQNFKQNYDSTAFIMRENVTGDVCAKIVGLMKEFNAFPVLEYDVKNLESGSRQLSAVYKAVNSHFLYFKEPGRDALRKQLWYGGDSWTIDGIEIVTRERKEDGKEGVEKIVPLKVFPGRSVSARFTSKTCSCCGRNVFDWLFTEKKAKTNKKFNVNSKGELTTADGVIQLFEADRSKGPKFYARRKERTPLTKPIAKGSYSLEEIERRVRTNLRRAPKSKQSRDTSQSQYFCVYKDCALHFSGMQADENAAINIGRRFLTALRKNRRSDFPSNVKISDRLLDN

SEQ ID NO: 92 - protein, 1218 aa, Unknown
  Description of Unknown: Cas12c2 sequence
MTKHSIPLHAFRNSGADARKWKGRIALLAKRGKETMRTLQFPLEMSEPEAAAINTTPFAVAYNAIEGTGKGTLFDYWAKLHLAGFRFFPSGGAATIFRQQAVFEDASWNAAFCQQSGKDWPWLVPSKLYERFTKAPREVAKKDGSKKSIEFTQENVANESHVSLVGASITDKTPEDQKEFFLKMAGALAEKFDSWKSANEDRIVAMKVIDEFLKSEGLHLPSLENIAVKCSVETKPDNATVAWHDAPMSGVQNLAIGVFATCASRIDNIYDLNGGKLSKLIQESATTPNVTALSWLFGKGLEYFRTTDIDTIMQDFNIPASAKESIKPLVESAQAIPTMTVLGKKNYAPFRPNFGGKIDSWIANYASRLMLLNDILEQIEPGFELPQALLDNETLMSGIDMTGDELKELIEAVYAWVDAAKQGLATLLGRGGNVDDAVQTFEQFSAMMDTLNGTLNTISARYVRAVEMAGKDEARLEKLIECKFDIPKWCKSVPKLVGISGGLPKVEEEIKVMNAAFKDVRARMFVRFEEIAAYVASKGAGMDVYDALEKRELEQIKKLKSAVPERAHIQAYRAVLHRIGRAVQNCSEKTKQLFSSKVIEMGVFKNPSHLNNFIFNQKGAIYRSPFDRSRHAPYQLHADKLLKNDWLELLAEISATLMASESTEQMEDALRLERTRLQLQLSGLPDWEYPASLAKPDIEVEIQTALKMQLAKDTVTSDVLQRAFNLYSSVLSGLTFKLLRRSFSLKMRFSVADTTQLIYVPKVCDWAIPKQYLQAEGEIGIAARVVTESSPAKMVTEVEMKEPKALGHFMQQAPHDWYFDASLGGTQVAGRIVEKGKEVGKERKLVGYRMRGNSAYKTVLDKSLVGNTELSQCSMIIEIPYTQTVDADFRAQVQAGLPKVSINLPVKETITASNKDEQMLFDRFVAIDLGERGLGYAVFDAKTLELQESGHRPIKAITNLLNRTHHYEQRPNQRQKFQAKFNVNLSELRENTVGDVCHQINRICAYYNAFPVLEYMVPDRLDKQLKSVYESVTNRYIWSSTDAHKSARVQFWLGGETWEHPYLKSAKDKKPLVLSPGRGASGKGTSQTCSCCGRNPFDLIKDMKPRAKIAVVDGKAKLENSELKLFERNLESKDDMLARRHRNERAGMEQPLTPGNYTVDEIKALLRANLRRAPKNRRTKDTTVSEYHCVFSDCGKTMHADENAAVNIGGKFIADIEK

SEQ ID NO: 93 - protein, 1252 aa, Oleiphilus sp.
MTKLRHRQKKLTHDWAGSKKREVLGSNGKLQNPLLMPVKKGQVTEFRKAFSAYARATKGEMTDGRKNMFTHSFEPFKTKPSLHQCELADKAYQSLHSYLPGSLAHFLLSAHALGFRIFSKSGEATAFQASSKIEAYESKLASELACVDLSIQNLTISTLFNALTTSVRGKGEETSADPLIARFYTLLTGKPLSRDTQGPERDLAEVISRKIASSFGTWKEMTANPLQSLQFFEEELHALDANVSLSPAFDVLIKMNDLQGDLKNRTIVFDPDAPVFEYNAEDPADIIIKLTARYAKEAVIKNQNVGNYVKNAITTTNANGLGWLLNKGLSLLPVSTDDELLEFIGVERSHPSCHALIELIAQLEAPELFEKNVFSDTRSEVQGMIDSAVSNHIARLSSSRNSLSMDSEELERLIKSFQIHTPHCSLFIGAQSLSQQLESLPEALQSGVNSADILLGSTQYMLTNSLVEESIATYQRTLNRINYLSGVAGQINGAIKRKAIDGEKIHLPAAWSELISLPFIGQPVIDVESDLAHLKNQYQTLSNEFDTLISALQKNFDLNFNKALLNRTQHFEAMCRSTKKNALSKPEIVSYRDLLARLTSCLYRGSLVLRRAGIEVLKKHKIFESNSELREHVHERKHFVFVSPLDRKAKKLLRLTDSRPDLLHVIDEILQHDNLENKDRESLWLVRSGYLLAGLPDQLSSSFINLPIITQKGDRRLIDLIQYDQINRDAFVMLVTSAFKSNLSGLQYRANKQSFVVTRTLSPYLGSKLVYVPKDKDWLVPSQMFEGRFADILQSDYMVWKDAGRLCVIDTAKHLSNIKKSVFSSEEVLAFLRELPHRTFIQTEVRGLGVNVDGIAFNNGDIPSLKTFSNCVQVKVSRTNTSLVQTLNRWFEGGKVSPPSIQFERAYYKKDDQIHEDAAKRKIRFQMPATELVHASDDAGWTPSYLLGIDPGEYGMGLSLVSINNGEVLDSGFIHINSLINFASKKSNHQTKVVPRQQYKSPYANYLEQSKDSAAGDIAHILDRLIYKLNALPVFEALSGNSQSAADQVWTKVLSFYTWGDNDAQNSIRKQHWFGASHWDIKGMLRQPPTEKKPKPYIAFPGSQVSSYGNSQRCSCCGRNPIEQLREMAKDTSIKELKIRNSEIQLFDGTIKLFNPDPSTVIERRRHNLGPSRIPVADRTFKNISPSSLEFKELITIVSRSIRHSPEFIAKKRGIGSEYFCAYSDCNSSLNSEANAAANVAQKFQKQLFFEL

SEQ ID NO: 94 - protein, 767 aa, Unknown
  Description of Unknown: Cas12g1 sequence
MAQASSTPAVSPRPRPRYREERTLVRKLLPRPGQSKQEFRENVKKLRKAFLQFNADVSGVCQWAIQFRPRYGKPAEPTETFWKFFLEPETSLPPNDSRSPEFRRLQAFEAAAGINGAAALDDPAFTNELRDSILAVASRPKTKEAQRLFSRLKDYQPAHRMILAKVAAEWIESRYRRAHQNWERNYEEWKKEKQEWEQNHPELTPEIREAFNQIFQQLEVKEKRVRICPAARLLQNKDNCQYAGKNKHSVLCNQFNEFKKNHLQGKAIKFFYKDAEKYLRCGLQSLKPNVQGPFREDWNKYLRYMNLKEETLRGKNGGRLPHCKNLGQECEFNPHTALCKQYQQQLSSRPDLVQHDELYRKWRREYWREPRKPVFRYPSVKRHSIAKIFGENYFQADFKNSVVGLRLDSMPAGQYLEFAFAPWPRNYRPQPGETEISSVHLHFVGTRPRIGFRFRVPHKRSRFDCTQEELDELRSRTFPRKAQDQKFLEAARKRLLETFPGNAEQELRLLAVDLGTDSARAAFFIGKTFQQAFPLKIVKIEKLYEQWPNQKQAGDRRDASSKQPRPGLSRDHVGRHLQKMRAQASEIAQKRQELTGTPAPETTTDQAAKKATLQPFDLRGLTVHTARMIRDWARLNARQIIQLAEENQVDLIVLESLRGFRPPGYENLDQEKKRRVAFFAHGRIRRKVTEKAVERGMRVVTVPYLASSKVCAECRKKQKDNKQWEKNKKRGLFKCEGCGSQAQVDENAARVLGRVFWGEIELPTAIP

SEQ ID NO: 95 - protein, 870 aa, Unknown
  Description of Unknown: Cas12h1 sequence
MKVHEIPRSQLLKIKQYEGSFVEWYRDLQEDRKKFASLLFRWAAFGYAAREDDGATYISPSQALLERRLLLGDAEDVAIKFLDVLFKGGAPSSSCYSLFYEDFALRDKAKYSGAKREFIEGLATMPLDKIIERIRQDEQLSKIPAEEWLILGAEYSPEEIWEQVAPRIVNVDRSLGKQLRERLGIKCRRPHDAGYCKILMEVVARQLRSHNETYHEYLNQTHEMKTKVANNLTNEFDLVCEFAEVLEEKNYGLGWYVLWQGVKQALKEQKKPTKIQIAVDQLRQPKFAGLLTAKWRALKGAYDTWKLKKRLEKRKAFPYMPNWDNDYQIPVGLTGLGVFTLEVKRTEVVVDLKEHGKLFCSHSHYFGDLTAEKHPSRYHLKFRHKLKLRKRDSRVEPTIGPWIEAALREITIQKKPNGVFYLGLPYALSHGIDNFQIAKRFFSAAKPDKEVINGLPSEMVVGAADLNLSNIVAPVKARIGKGLEGPLHALDYGYGELIDGPKILTPDGPRCGELISLKRDIVEIKSAIKEFKACQREGLTMSEETTTWLSEVESPSDSPRCMIQSRIADTSRRLNSFKYQMNKEGYQDLAEALRLLDAMDSYNSLLESYQRMHLSPGEQSPKEAKFDTKRASFRDLLRRRVAHTIVEYFDDCDIVFFEDLDGPSDSDSRNNALVKLLSPRTLLLYIRQALEKRGIGMVEVAKDGTSQNNPISGHVGWRNKQNKSEIYFYEDKELLVMDADEVGAMNILCRGLNHSVCPYSFVTKAPEKKNDEKKEGDYGKRVKRFLKDRYGSSNVRFLVASMGFVTVTTKRPKDALVGKRLYYHGGELVTHDLHNRMKDEIKYLVEKEVLARRVSLSDSTIKSYKSFAHV

SEQ ID NO: 96 - protein, 1093 aa, Unknown
  Description of Unknown: Cas12i1 sequence
MSNKEKNASETRKAYTTKMIPRSHDRMKLLGNFMDYLMDGTPIFFELWNQFGGGIDRDIISGTANKDKISDDLLLAVNWFKVMPINSKPQGVSPSNLANLFQQYSGSEPDIQAQEYFASNFDTEKHQWKDMRVEYERLLAELQLSRSDMHHDLKLMYKEKCIGLSLSTAHYITSVMFGTGAKNNRQTKHQFYSKVIQLLEESTQINSVEQLASIILKAGDCDSYRKLRIRCSRKGATPSILKIVQDYELGTNHDDEVNVPSLIANLKEKLGRFEYECEWKCMEKIKAFLASKVGPYYLGSYSAMLENALSPIKGMTTKNCKFVLKQIDAKNDIKYENEPFGKIVEGFFDSPYFESDTNVKWVLHPHHIGESNIKTLWEDLNAIHSKYEEDIASLSEDKKEKRIKVYQGDVCQTINTYCEEVGKEAKTPLVQLLRYLYSRKDDIAVDKIIDGITFLSKKHKVEKQKINPVIQKYPSFNFGNNSKLLGKIISPKDKLKHNLKCNRNQVDNYIWIEIKVLNTKTMRWEKHHYALSSTRFLEEVYYPATSENPPDALAARFRTKTNGYEGKPALSAEQIEQIRSAPVGLRKVKKRQMRLEAARQQNLLPRYTWGKDFNINICKRGNNFEVTLATKVKKKKEKNYKVVLGYDANIVRKNTYAAIEAHANGDGVIDYNDLPVKPIESGFVTVESQVRDKSYDQLSYNGVKLLYCKPHVESRRSFLEKYRNGTMKDNRGNNIQIDFMKDFEAIADDETSLYYFNMKYCKLLQSSIRNHSSQAKEYREEIFELLRDGKLSVLKLSSLSNLSFVMFKVAKSLIGTYFGHLLKKPKNSKSDVKAPPITDEDKQKADPEMFALRLALEEKRLNKVKSKKEVIANKIVAKALELRDKYGPVLIKGENISDTTKKGKKSSTNSFLMDWLARGVANKVKEMVMMHQGLEFVEVNPNFTSHQDPFVHKNPENTFRARYSRCTPSELTEKNRKEILSFLSDKPSKRPTNAYYNEGAMAFLATYGLKKNDVLGVSLEKFKQIMANILHQRSEDQLLFPSRGGMFYLATYKLDADATSVNWNGKQFWVCNADLVAAYNVGLVDIQKDFKKK

SEQ ID NO: 97 - protein, 1054 aa, Unknown
  Description of Unknown: Cas12i2 sequence
MSSAIKSYKSVLRPNERKNQLLKSTIQCLEDGSAFFFKMLQGLFGGITPEIVRFSTEQEKQQQDIALWCAVNWFRPVSQDSLTHTIASDNLVEKFEEYYGGTASDAIKQYFSASIGESYYWNDCRQQYYDLCRELGVEVSDLTHDLEILCREKCLAVATESNQNNSIISVLFGTGEKEDRSVKLRITKKILEAISNLKEIPKNVAPIQEIILNVAKATKETFRQVYAGNLGAPSTLEKFIAKDGQKEFDLKKLQTDLKKVIRGKSKERDWCCQEELRSYVEQNTIQYDLWAWGEMFNKAHTALKIKSTRNYNFAKQRLEQFKEIQSLNNLLVVKKLNDFFDSEFFSGEETYTICVHHLGGKDLSKLYKAWEDDPADPENAIVVLCDDLKNNFKKEPIRNILRYIFTIRQECSAQDILAAAKYNQQLDRYKSQKANPSVLGNQGFTWTNAVILPEKAQRNDRPNSLDLRIWLYLKLRHPDGRWKKHHIPFYDTRFFQEIYAAGNSPVDTCQFRTPRFGYHLPKLTDQTAIRVNKKHVKAAKTEARIRLAIQQGTLPVSNLKITEISATINSKGQVRIPVKFDVGRQKGTLQIGDRFCGYDQNQTASHAYSLWEVVKEGQYHKELGCFVRFISSGDIVSITENRGNQFDQLSYEGLAYPQYADWRKKASKFVSLWQITKKNKKKEIVTVEAKEKFDAICKYQPRLYKFNKEYAYLLRDIVRGKSLVELQQIRQEIFRFIEQDCGVTRLGSLSLSTLETVKAVKGIIYSYFSTALNASKNNPISDEQRKEFDPELFALLEKLELIRTRKKKQKVERIANSLIQTCLENNIKFIRGEGDLSTTNNATKKKANSRSMDWLARGVFNKIRQLAPMHNITLFGCGSLYTSHQDPLVHRNPDKAMKCRWAAIPVKDIGDWVLRKLSQNLRAKNIGTGEYYHQGVKEFLSHYELQDLEEELLKWRSDRKSNIPCWVLQNRLAEKLGNKEAVVYIPVRGGRIYFATHKVATGAVSIVFDQKQVWVCNADHVAAANIALTVKGIGEQSSDEENPDGSRIKLQLTS

SEQ ID NO: 98 - protein, 6 aa, Artificial Sequence
  Description of Artificial Sequence: Synthetic peptide
GGSGGS

SEQ ID NO: 99 - DNA, 4092 bp, Artificial Sequence
  Description of Artificial Sequence: Synthetic polynucleotide
gccaccatggccccaaagaagaagcggaaggtcggtatccacggagtcccagcagccgccaccagatccttcatcctgaagatcgagcccaacgaggaagtgaagaaaggcctctggaaaacccacgaggtgctgaaccacggaatcgcctactacatgaatatcctgaagctgatccggcaagaggccatctacgagcaccacgagcaggaccccaagaatcccaagaaggtgtccaaggccgagatccaggccgagctgtgggatttcgtgctgaagatgcagaagtgcaacagcttcacacacgaggtggacaaggacgaggtgttcaacatcctgagagagctgtacgaggaactggtgcccagcagcgtggaaaagaagggcgaagccaaccagctgagcaacaagtttctgtaccctctggtggaccccaacagccagtctggaaagggaacagccagcagcggcagaaagcccagatggtacaacctgaagattgccggcgatcccggaggctctggaggaagctccgaagtcgagttttcccatgagtactggatgagacacgcattgactctcgcaaagagggctcgagatgaacgcgaggtgcccgtgggggcagtactcgtgctcaacaatcgcgtaatcggcgaaggttggaatagggcaatcggactccacgaccccactgcacatgcggaaatcatggcccttcgacagggagggcttgtgatgcagaattatcgactttatgatgcgacgctgtacgtcacgtttgaaccttgcgtaatgtgcgcgggagctatgattcactcccgcattggacgagttgtattcggtgttcgcaacgccaagacgggtgccgcaggttcactgatggacgtgctgcatcatccaggcatgaaccaccgggtagaaatcacagaaggcatattggcggacgaatgtgcggcgctgttgtgtcgtttttttcgcatgcccaggcgggtctttaacgcccagaaaaaagcacaatcctctactgacggctcttctggatctgaaacacctggcacaagcgagagcgccacccctgagagctctggctcctgggaagaagagaagaagaagtgggaagaagataagaaaaaggacccgctggccaagatcctgggcaagctggctgagtacggactgatccctctgttcatcccctacaccgacagcaacgagcccatcgtgaaagaaatcaagtggatggaaaagtcccggaaccagagcgtgcggcggctggataaggacatgttcattcaggccctggaacggttcctgagctgggagagctggaacctgaaagtgaaagaggaatacgagaaggtcgagaaagagtacaagaccctggaagagaggatcaaagaggacatccaggctctgaaggctctggaacagtatgagaaagagcggcaagaacagctgctgcgggacaccctgaacaccaacgagtaccggctgagcaagagaggccttagaggctggcgggaaatcatccagaaatggctgaaaatggacgagaacgagccctccgagaagtacctggaagtgttcaaggactaccagcggaagcaccctagagaggccggcgattacagcgtgtacgagttcctgtccaagaaagagaaccacttcatctggcggaatcaccctgagtacccctacctgtacgccaccttctgcgagatcgacaagaaaaagaaggacgccaagcagcaggccaccttcacactggccgatcctatcaatcaccctctgtgggtccgattcgaggaaagaagcggcagcaacctgaacaagtacagaatcctgaccgagcagctgcacaccgagaagctgaagaaaaagctgacagtgcagctggaccggctgatctaccctacagaatctggcggctgggaagagaagggcaaagtggacattgtgctgctgcccagccggcagttctacaaccagatcttcctggacatcgaggaaaagggcaagcacgccttcacctacaaggatgagagcatcaagttccctctgaagggcacactcggcggagccagagtgcagttcgacagagatcacctgagaagataccctcacaaggtggaaagcggcaacgtgggcagaatctacttcaacatgaccgtgaacatcgagcctacagagtccccagtgtccaagtctctgaagatccaccgggacgacttccccaaggtggtcaacttcaagcccaaagaactgaccgagtggatcaaggacagcaagggcaagaaactgaagtccggcatcgagtccctggaaatcggcctgagagtgatgagcatcgacctgggacagagacaggccgctgccgcctctattttcgaggtggtggatcagaagcccgacatcgaaggcaagctgtttttcccaatcaagggcaccgagctgtatgccgtgcacagagccagcttcaacatcaagctgcccggcgagacactggtcaagagcagagaagtgctgcggaaggccagagaggacaatctgaaactgatgaaccagaagctcaacttcctgcggaacgtgctgcacttccagcagttcgaggacatcaccgagagagagaagcgggtcaccaagtggatcagcagacaagagaacagcgacgtgcccctggtgtaccaggatgagctgatccagatccgcgagctgatgtacaagccttacaaggactgggtcgccttcctgaagcagctccacaagagactggaagtcgagatcggcaaagaagtgaagcactggcggaagtccctgagcgacggaagaaagggcctgtacggcatctccctgaagaacatcgacgagatcgatcggacccggaagttcctgctgagatggtccctgaggcctaccgaacctggcgaagtgcgtagactggaacccggccagagattcgccatcgaccagctgaatcacctgaacgccctgaaagaagatcggctgaagaagatggccaacaccatcatcatgcacgccctgggctactgctacgacgtgcggaagaagaaatggcaggctaagaaccccgcctgccagatcatcctgttcgaggatctgagcaactacaacccctacgaggaaaggtcccgcttcgagaacagcaagctcatgaagtggtccagacgcgagatccccagacaggttgcactgcagggcgagatctatggcctgcaagtgggagaagtgggcgctcagttcagcagcagattccacgccaagacaggcagccctggcatcagatgtagcgtcgtgaccaaagagaagctgcaggacaatcggttcttcaagaatctgcagagagagggcagactgaccctggacaaaatcgccgtgctgaaagagggcgatctgtacccagacaaaggcggcgagaagttcatcagcctgagcaaggatcggaagtgcgtgaccacacacgccgacatcaacgccgctcagaacctgcagaagcggttctggacaagaacccacggcttctacaaggtgtactgcaaggcctaccaggtggacggccagaccgtgtacatccctgagagcaaggaccagaagcagaagatcatcgaagagttcggcgagggctacttcattctgaaggacggggtgtacgaatgggtcaacgccggcaagctgaaaatcaagaagggcagctccaagcagagcagcagcgagctggtggatagcgacatcctgaaagacagcttcgacctggcctccgagctgaaaggcgaaaagctgatgctgtacagggaccccagcggcaatgtgttccccagcgacaaatggatggccgctggcgtgttcttcggaaagctggaacgcatcctgatcagcaagctgaccaaccagtactccatcagcaccatcgaggacgacagcagcaagcagtctatgaaaaggccggcggccacgaaaaaggccggccaggcaaaaaagaaaaagggatcctacccatacgatgttccagattacgcttatccctacgacgtgcctgattatgcatacccatatgatgtccccgactatgcctaa

SEQ ID NO: 100 - protein, 1361 aa, Artificial Sequence
  Description of Artificial Sequence: Synthetic polypeptide
MAPKKKRKVGIHGVPAAATRSFILKIEPNEEVKKGLWKTHEVLNHGIAYYMNILKLIRQEAIYEHHEQDPKNPKKVSKAEIQAELWDFVLKMQKCNSFTHEVDKDEVFNILRELYEELVPSSVEKKGEANQLSNKFLYPLVDPNSQSGKGTASSGRKPRWYNLKIAGDPGGSGGSSEVEFSHEYWMRHALTLAKRARDEREVPVGAVLVLNNRVIGEGWNRAIGLHDPTAHAEIMALRQGGLVMQNYRLYDATLYVTFEPCVMCAGAMIHSRIGRVVFGVRNAKTGAAGSLMDVLHHPGMNHRVEITEGILADECAALLCRFFRMPRRVFNAQKKAQSSTDGSSGSETPGTSESATPESSGSWEEEKKKWEEDKKKDPLAKILGKLAEYGLIPLFIPYTDSNEPIVKEIKWMEKSRNQSVRRLDKDMFIQALERFLSWESWNLKVKEEYEKVEKEYKTLEERIKEDIQALKALEQYEKERQEQLLRDTLNTNEYRLSKRGLRGWREIIQKWLKMDENEPSEKYLEVFKDYQRKHPREAGDYSVYEFLSKKENHFIWRNHPEYPYLYATFCEIDKKKKDAKQQATFTLADPINHPLWVRFEERSGSNLNKYRILTEQLHTEKLKKKLTVQLDRLIYPTESGGWEEKGKVDIVLLPSRQFYNQIFLDIEEKGKHAFTYKDESIKFPLKGTLGGARVQFDRDHLRRYPHKVESGNVGRIYFNMTVNIEPTESPVSKSLKIHRDDFPKVVNFKPKELTEWIKDSKGKKLKSGIESLEIGLRVMSIDLGQRQAAAASIFEVVDQKPDIEGKLFFPIKGTELYAVHRASFNIKLPGETLVKSREVLRKAREDNLKLMNQKLNFLRNVLHFQQFEDITEREKRVTKWISRQENSDVPLVYQDELIQIRELMYKPYKDWVAFLKQLHKRLEVEIGKEVKHWRKSLSDGRKGLYGISLKNIDEIDRTRKFLLRWSLRPTEPGEVRRLEPGQRFAIDQLNHLNALKEDRLKKMANTIIMHALGYCYDVRKKKWQAKNPACQIILFEDLSNYNPYEERSRFENSKLMKWSRREIPRQVALQGEIYGLQVGEVGAQFSSRFHAKTGSPGIRCSVVTKEKLQDNRFFKNLQREGRLTLDKIAVLKEGDLYPDKGGEKFISLSKDRKCVTTHADINAAQNLQKRFWTRTHGFYKVYCKAYQVDGQTVYIPESKDQKQKIIEEFGEGYFILKDGVYEWVNAGKLKIKKGSSKQSSSELVDSDILKDSFDLASELKGEKLMLYRDPSGNVFPSDKWMAAGVFFGKLERILISKLTNQYSISTIEDDSSKQSMKRPAATKKAGQAKKKKGSYPYDVPDYAYPYDVPDYAYPYDVPDYA

SEQ ID NO: 101 - DNA, 4092 bp, Artificial Sequence
  Description of Artificial Sequence: Synthetic polynucleotide
gccaccatggccccaaagaagaagcggaaggtcggtatccacggagtcccagcagccgccaccagatccttcatcctgaagatcgagcccaacgaggaagtgaagaaaggcctctggaaaacccacgaggtgctgaaccacggaatcgcctactacatgaatatcctgaagctgatccggcaagaggccatctacgagcaccacgagcaggaccccaagaatcccaagaaggtgtccaaggccgagatccaggccgagctgtgggatttcgtgctgaagatgcagaagtgcaacagcttcacacacgaggtggacaaggacgaggtgttcaacatcctgagagagctgtacgaggaactggtgcccagcagcgtggaaaagaagggcgaagccaaccagctgagcaacaagtttctgtaccctctggtggaccccaacagccagtctggaaagggaacagccagcagcggcagaaagcccagatggtacaacctgaagattgccggcgatccctcctgggaagaagagaagaagaagtgggaagaagataagaaaaaggacccgctggccaagatcctgggcaagctggctgagtacggactgatccctctgttcatcccctacaccgacagcaacgagcccatcgtgaaagaaatcaagtggatggaaaagtcccggaaccagagcgtgcggcggctggataaggacatgttcattcaggccctggaacggttcctgagctgggagagctggaacctgaaagtgaaagaggaatacgagaaggtcgagaaagagtacaagaccctggaagagaggatcaaaggaggctctggaggaagctccgaagtcgagttttcccatgagtactggatgagacacgcattgactctcgcaaagagggctcgagatgaacgcgaggtgcccgtgggggcagtactcgtgctcaacaatcgcgtaatcggcgaaggttggaatagggcaatcggactccacgaccccactgcacatgcggaaatcatggcccttcgacagggagggcttgtgatgcagaattatcgactttatgatgcgacgctgtacgtcacgtttgaaccttgcgtaatgtgcgcgggagctatgattcactcccgcattggacgagttgtattcggtgttcgcaacgccaagacgggtgccgcaggttcactgatggacgtgctgcatcatccaggcatgaaccaccgggtagaaatcacagaaggcatattggcggacgaatgtgcggcgctgttgtgtcgtttttttcgcatgcccaggcgggtctttaacgcccagaaaaaagcacaatcctctactgacggctcttctggatctgaaacacctggcacaagcgagagcgccacccctgagagctctggcgaggacatccaggctctgaaggctctggaacagtatgagaaagagcggcaagaacagctgctgcgggacaccctgaacaccaacgagtaccggctgagcaagagaggccttagaggctggcgggaaatcatccagaaatggctgaaaatggacgagaacgagccctccgagaagtacctggaagtgttcaaggactaccagcggaagcaccctagagaggccggcgattacagcgtgtacgagttcctgtccaagaaagagaaccacttcatctggcggaatcaccctgagtacccctacctgtacgccaccttctgcgagatcgacaagaaaaagaaggacgccaagcagcaggccaccttcacactggccgatcctatcaatcaccctctgtgggtccgattcgaggaaagaagcggcagcaacctgaacaagtacagaatcctgaccgagcagctgcacaccgagaagctgaagaaaaagctgacagtgcagctggaccggctgatctaccctacagaatctggcggctgggaagagaagggcaaagtggacattgtgctgctgcccagccggcagttctacaaccagatcttcctggacatcgaggaaaagggcaagcacgccttcacctacaaggatgagagcatcaagttccctctgaagggcacactcggcggagccagagtgcagttcgacagagatcacctgagaagataccctcacaaggtggaaagcggcaacgtgggcagaatctacttcaacatgaccgtgaacatcgagcctacagagtccccagtgtccaagtctctgaagatccaccgggacgacttccccaaggtggtcaacttcaagcccaaagaactgaccgagtggatcaaggacagcaagggcaagaaactgaagtccggcatcgagtccctggaaatcggcctgagagtgatgagcatcgacctgggacagagacaggccgctgccgcctctattttcgaggtggtggatcagaagcccgacatcgaaggcaagctgtttttcccaatcaagggcaccgagctgtatgccgtgcacagagccagcttcaacatcaagctgcccggcgagacactggtcaagagcagagaagtgctgcggaaggccagagaggacaatctgaaactgatgaaccagaagctcaacttcctgcggaacgtgctgcacttccagcagttcgaggacatcaccgagagagagaagcgggtcaccaagtggatcagcagacaagagaacagcgacgtgcccctggtgtaccaggatgagctgatccagatccgcgagctgatgtacaagccttacaaggactgggtcgccttcctgaagcagctccacaagagactggaagtcgagatcggcaaagaagtgaagcactggcggaagtccctgagcgacggaagaaagggcctgtacggcatctccctgaagaacatcgacgagatcgatcggacccggaagttcctgctgagatggtccctgaggcctaccgaacctggcgaagtgcgtagactggaacccggccagagattcgccatcgaccagctgaatcacctgaacgccctgaaagaagatcggctgaagaagatggccaacaccatcatcatgcacgccctgggctactgctacgacgtgcggaagaagaaatggcaggctaagaaccccgcctgccagatcatcctgttcgaggatctgagcaactacaacccctacgaggaaaggtcccgcttcgagaacagcaagctcatgaagtggtccagacgcgagatccccagacaggttgcactgcagggcgagatctatggcctgcaagtgggagaagtgggcgctcagttcagcagcagattccacgccaagacaggcagccctggcatcagatgtagcgtcgtgaccaaagagaagctgcaggacaatcggttcttcaagaatctgcagagagagggcagactgaccctggacaaaatcgccgtgctgaaagagggcgatctgtacccagacaaaggcggcgagaagttcatcagcctgagcaaggatcggaagtgcgtgaccacacacgccgacatcaacgccgctcagaacctgcagaagcggttctggacaagaacccacggcttctacaaggtgtactgcaaggcctaccaggtggacggccagaccgtgtacatccctgagagcaaggaccagaagcagaagatcatcgaagagttcggcgagggctacttcattctgaaggacggggtgtacgaatgggtcaacgccggcaagctgaaaatcaagaagggcagctccaagcagagcagcagcgagctggtggatagcgacatcctgaaagacagcttcgacctggcctccgagctgaaaggcgaaaagctgatgctgtacagggaccccagcggcaatgtgttccccagcgacaaatggatggccgctggcgtgttcttcggaaagctggaacgcatcctgatcagcaagctgaccaaccagtactccatcagcaccatcgaggacgacagcagcaagcagtctatgaaaaggccggcggccacgaaaaaggccggccaggcaaaaaagaaaaagggatcctacccatacgatgttccagattacgcttatccctacgacgtgcctgattatgcatacccatatgatgtccccgactatgcctaa

SEQ ID NO: 102 - protein, 1361 aa, Artificial Sequence
  Description of Artificial Sequence: Synthetic polypeptide
MAPKKKRKVGIHGVPAAATRSFILKIEPNEEVKKGLWKTHEVLNHGIAYYMNILKLIRQEAIYEHHEQDPKNPKKVSKAEIQAELWDFVLKMQKCNSFTHEVDKDEVFNILRELYEELVPSSVEKKGEANQLSNKFLYPLVDPNSQSGKGTASSGRKPRWYNLKIAGDPSWEEEKKKWEEDKKKDPLAKILGKLAEYGLIPLFIPYTDSNEPIVKEIKWMEKSRNQSVRRLDKDMFIQALERFLSWESWNLKVKEEYEKVEKEYKTLEERIKGGSGGSSEVEFSHEYWMRHALTLAKRARDEREVPVGAVLVLNNRVIGEGWNRAIGLHDPTAHAEIMALRQGGLVMQNYRLYDATLYVTFEPCVMCAGAMIHSRIGRVVFGVRNAKTGAAGSLMDVLHHPGMNHRVEITEGILADECAALLCRFFRMPRRVFNAQKKAQSSTDGSSGSETPGTSESATPESSGEDIQALKALEQYEKERQEQLLRDTLNTNEYRLSKRGLRGWREIIQKWLKMDENEPSEKYLEVFKDYQRKHPREAGDYSVYEFLSKKENHFIWRNHPEYPYLYATFCEIDKKKKDAKQQATFTLADPINHPLWVRFEERSGSNLNKYRILTEQLHTEKLKKKLTVQLDRLIYPTESGGWEEKGKVDIVLLPSRQFYNQIFLDIEEKGKHAFTYKDESIKFPLKGTLGGARVQFDRDHLRRYPHKVESGNVGRIYFNMTVNIEPTESPVSKSLKIHRDDFPKVVNFKPKELTEWIKDSKGKKLKSGIESLEIGLRVMSIDLGQRQAAAASIFEVVDQKPDIEGKLFFPIKGTELYAVHRASFNIKLPGETLVKSREVLRKAREDNLKLMNQKLNFLRNVLHFQQFEDITEREKRVTKWISRQENSDVPLVYQDELIQIRELMYKPYKDWVAFLKQLHKRLEVEIGKEVKHWRKSLSDGRKGLYGISLKNIDEIDRTRKFLLRWSLRPTEPGEVRRLEPGQRFAIDQLNHLNALKEDRLKKMANTIIMHALGYCYDVRKKKWQAKNPACQIILFEDLSNYNPYEERSRFENSKLMKWSRREIPRQVALQGEIYGLQVGEVGAQFSSRFHAKTGSPGIRCSVVTKEKLQDNRFFKNLQREGRLTLDKIAVLKEGDLYPDKGGEKFISLSKDRKCVTTHADINAAQNLQKRFWTRTHGFYKVYCKAYQVDGQTVYIPESKDQKQKIIEEFGEGYFILKDGVYEWVNAGKLKIKKGSSKQSSSELVDSDILKDSFDLASELKGEKLMLYRDPSGNVFPSDKWMAAGVFFGKLERILISKLTNQYSISTIEDDSSKQSMKRPAATKKAGQAKKKKGSYPYDVPDYAYPYDVPDYAYPYDVPDYA

SEQ ID NO: 103 - DNA, 4092 bp, Artificial Sequence
  Description of Artificial Sequence: Synthetic polynucleotide
gccaccatggccccaaagaagaagcggaaggtcggtatccacggagtcccagcagccgccaccagatccttcatcctgaagatcgagcccaacgaggaagtgaagaaaggcctctggaaaacccacgaggtgctgaaccacggaatcgcctactacatgaatatcctgaagctgatccggcaagaggccatctacgagcaccacgagcaggaccccaagaatcccaagaaggtgtccaaggccgagatccaggccgagctgtgggatttcgtgctgaagatgcagaagtgcaacagcttcacacacgaggtggacaaggacgaggtgttcaacatcctgagagagctgtacgaggaactggtgcccagcagcgtggaaaagaagggcgaagccaaccagctgagcaacaagtttctgtaccctctggtggaccccaacagccagtctggaaagggaacagccagcagcggcagaaagcccagatggtacaacctgaagattgccggcgatccctcctgggaagaagagaagaagaagtgggaagaagataagaaaaaggacccgctggccaagatcctgggcaagctggctgagtacggactgatccctctgttcatcccctacaccgacagcaacgagcccatcgtgaaagaaatcaagtggatggaaaagtcccggaaccagagcgtgcggcggctggataaggacatgttcattcaggccctggaacggttcctgagctgggagagctggaacctgaaagtgaaagaggaatacgagaaggtcgagaaagagtacaagaccctggaagagaggatcaaagaggacatccaggctctgaaggctctggaacagtatgagaaagagcggcaagaacagctgctgcgggacaccctgaacaccaacgagtaccggctgagcaagagaggccttagaggctggcgggaaatcatccagaaatggctgaaaatggacggaggctctggaggaagctccgaagtcgagttttcccatgagtactggatgagacacgcattgactctcgcaaagagggctcgagatgaacgcgaggtgcccgtgggggcagtactcgtgctcaacaatcgcgtaatcggcgaaggttggaatagggcaatcggactccacgaccccactgcacatgcggaaatcatggcccttcgacagggagggcttgtgatgcagaattatcgactttatgatgcgacgctgtacgtcacgtttgaaccttgcgtaatgtgcgcgggagctatgattcactcccgcattggacgagttgtattcggtgttcgcaacgccaagacgggtgccgcaggttcactgatggacgtgctgcatcatccaggcatgaaccaccgggtagaaatcacagaaggcatattggcggacgaatgtgcggcgctgttgtgtcgtttttttcgcatgcccaggcgggtctttaacgcccagaaaaaagcacaatcctctactgacggctcttctggatctgaaacacctggcacaagcgagagcgccacccctgagagctctggcgagaacgagccctccgagaagtacctggaagtgttcaaggactaccagcggaagcaccctagagaggccggcgattacagcgtgtacgagttcctgtccaagaaagagaaccacttcatctggcggaatcaccctgagtacccctacctgtacgccaccttctgcgagatcgacaagaaaaagaaggacgccaagcagcaggccaccttcacactggccgatcctatcaatcaccctctgtgggtccgattcgaggaaagaagcggcagcaacctgaacaagtacagaatcctgaccgagcagctgcacaccgagaagctgaagaaaaagctgacagtgcagctggaccggctgatctaccctacagaatctggcggctgggaagagaagggcaaagtggacattgtgctgctgcccagccggcagttctacaaccagatcttcctggacatcgaggaaaagggcaagcacgccttcacctacaaggatgagagcatcaagttccctctgaagggcacactcggcggagccagagtgcagttcgacagagatcacctgagaagataccctcacaaggtggaaagcggcaacgtgggcagaatctacttcaacatgaccgtgaacatcgagcctacagagtccccagtgtccaagtctctgaagatccaccgggacgacttccccaaggtggtcaacttcaagcccaaagaactgaccgagtggatcaaggacagcaagggcaagaaactgaagtccggcatcgagtccctggaaatcggcctgagagtgatgagcatcgacctgggacagagacaggccgctgccgcctctattttcgaggtggtggatcagaagcccgacatcgaaggcaagctgtttttcccaatcaagggcaccgagctgtatgccgtgcacagagccagcttcaacatcaagctgcccggcgagacactggtcaagagcagagaagtgctgcggaaggccagagaggacaatctgaaactgatgaaccagaagctcaacttcctgcggaacgtgctgcacttccagcagttcgaggacatcaccgagagagagaagcgggtcaccaagtggatcagcagacaagagaacagcgacgtgcccctggtgtaccaggatgagctgatccagatccgcgagctgatgtacaagccttacaaggactgggtcgccttcctgaagcagctccacaagagactggaagtcgagatcggcaaagaagtgaagcactggcggaagtccctgagcgacggaagaaagggcctgtacggcatctccctgaagaacatcgacgagatcgatcggacccggaagttcctgctgagatggtccctgaggcctaccgaacctggcgaagtgcgtagactggaacccggccagagattcgccatcgaccagctgaatcacctgaacgccctgaaagaagatcggctgaagaagatggccaacaccatcatcatgcacgccctgggctactgctacgacgtgcggaagaagaaatggcaggctaagaaccccgcctgccagatcatcctgttcgaggatctgagcaactacaacccctacgaggaaaggtcccgcttcgagaacagcaagctcatgaagtggtccagacgcgagatccccagacaggttgcactgcagggcgagatctatggcctgcaagtgggagaagtgggcgctcagttcagcagcagattccacgccaagacaggcagccctggcatcagatgtagcgtcgtgaccaaagagaagctgcaggacaatcggttcttcaagaatctgcagagagagggcagactgaccctggacaaaatcgccgtgctgaaagagggcgatctgtacccagacaaaggcggcgagaagttcatcagcctgagcaaggatcggaagtgcgtgaccacacacgccgacatcaacgccgctcagaacctgcagaagcggttctggacaagaacccacggcttctacaaggtgtactgcaaggcctaccaggtggacggccagaccgtgtacatccctgagagcaaggaccagaagcagaagatcatcgaagagttcggcgagggctacttcattctgaaggacggggtgtacgaatgggtcaacgccggcaagctgaaaatcaagaagggcagctccaagcagagcagcagcgagctggtggatagcgacatcctgaaagacagcttcgacctggcctccgagctgaaaggcgaaaagctgatgctgtacagggaccccagcggcaatgtgttccccagcgacaaatggatggccgctggcgtgttcttcggaaagctggaacgcatcctgatcagcaagctgaccaaccagtactccatcagcaccatcgaggacgacagcagcaagcagtctatgaaaaggccggcggccacgaaaaaggccggccaggcaaaaaagaaaaagggatcctacccatacgatgttccagattacgcttatccctacgacgtgcctgattatgcatacccatatgatgtccccgactatgcctaa

SEQ ID NO: 104 - protein, 1361 aa, Artificial Sequence
  Description of Artificial Sequence: Synthetic polypeptide
MAPKKKRKVGIHGVPAAATRSFILKIEPNEEVKKGLWKTHEVLNHGIAYYMNILKLIRQEAIYEHHEQDPKNPKKVSKAEIQAELWDFVLKMQKCNSFTHEVDKDEVFNILRELYEELVPSSVEKKGEANQLSNKFLYPLVDPNSQSGKGTASSGRKPRWYNLKIAGDPSWEEEKKKWEEDKKKDPLAKILGKLAEYGLIPLFIPYTDSNEPIVKEIKWMEKSRNQSVRRLDKDMFIQALERFLSWESWNLKVKEEYEKVEKEYKTLEERIKEDIQALKALEQYEKERQEQLLRDTLNTNEYRLSKRGLRGWREIIQKWLKMDGGSGGSSEVEFSHEYWMRHALTLAKRARDEREVPVGAVLVLNNRVIGEGWNRAIGLHDPTAHAEIMALRQGGLVMQNYRLYDATLYVTFEPCVMCAGAMIHSRIGRVVFGVRNAKTGAAGSLMDVLHHPGMNHRVEITEGILADECAALLCRFFRMPRRVFNAQKKAQSSTDGSSGSETPGTSESATPESSGENEPSEKYLEVFKDYQRKHPREAGDYSVYEFLSKKENHFIWRNHPEYPYLYATFCEIDKKKKDAKQQATFTLADPINHPLWVRFEERSGSNLNKYRILTEQLHTEKLKKKLTVQLDRLIYPTESGGWEEKGKVDIVLLPSRQFYNQIFLDIEEKGKHAFTYKDESIKFPLKGTLGGARVQFDRDHLRRYPHKVESGNVGRIYFNMTVNIEPTESPVSKSLKIHRDDFPKVVNFKPKELTEWIKDSKGKKLKSGIESLEIGLRVMSIDLGQRQAAAASIFEVVDQKPDIEGKLFFPIKGTELYAVHRASFNIKLPGETLVKSREVLRKAREDNLKLMNQKLNFLRNVLHFQQFEDITEREKRVTKWISRQENSDVPLVYQDELIQIRELMYKPYKDWVAFLKQLHKRLEVEIGKEVKHWRKSLSDGRKGLYGISLKNIDEIDRTRKFLLRWSLRPTEPGEVRRLEPGQRFAIDQLNHLNALKEDRLKKMANTIIMHALGYCYDVRKKKWQAKNPACQIILFEDLSNYNPYEERSRFENSKLMKWSRREIPRQVALQGEIYGLQVGEVGAQFSSRFHAKTGSPGIRCSVVTKEKLQDNRFFKNLQREGRLTLDKIAVLKEGDLYPDKGGEKFISLSKDRKCVTTHADINAAQNLQKRFWTRTHGFYKVYCKAYQVDGQTVYIPESKDQKQKIIEEFGEGYFILKDGVYEWVNAGKLKIKKGSSKQSSSELVDSDILKDSFDLASELKGEKLMLYRDPSGNVFPSDKWMAAGVFFGKLERILISKLTNQYSISTIEDDSSKQSMKRPAATKKAGQAKKKKGSYPYDVPDYAYPYDVPDYAYPYDVPDYA

SEQ ID NO: 105 - DNA, 4092 bp, Artificial Sequence
  Description of Artificial Sequence: Synthetic polynucleotide
gccaccatggccccaaagaagaagcggaaggtcggtatccacggagtcccagcagccgccaccagatccttcatcctgaagatcgagcccaacgaggaagtgaagaaaggcctctggaaaacccacgaggtgctgaaccacggaatcgcctactacatgaatatcctgaagctgatccggcaagaggccatctacgagcaccacgagcaggaccccaagaatcccaagaaggtgtccaaggccgagatccaggccgagctgtgggatttcgtgctgaagatgcagaagtgcaacagcttcacacacgaggtggacaaggacgaggtgttcaacatcctgagagagctgtacgaggaactggtgcccagcagcgtggaaaagaagggcgaagccaaccagctgagcaacaagtttctgtaccctctggtggaccccaacagccagtctggaaagggaacagccagcagcggcagaaagcccagatggtacaacctgaagattgccggcgatccctcctgggaagaagagaagaagaagtgggaagaagataagaaaaaggacccgctggccaagatcctgggcaagctggctgagtacggactgatccctctgttcatcccctacaccgacagcaacgagcccatcgtgaaagaaatcaagtggatggaaaagtcccggaaccagagcgtgcggcggctggataaggacatgttcattcaggccctggaacggttcctgagctgggagagctggaacctgaaagtgaaagaggaatacgagaaggtcgagaaagagtacaagaccctggaagagaggatcaaagaggacatccaggctctgaaggctctggaacagtatgagaaagagcggcaagaacagctgctgcgggacaccctgaacaccaacgagtaccggctgagcaagagaggccttagaggctggcgggaaatcatccagaaatggctgaaaatggacgagaacgagccctccgagaagtacctggaagtgttcaaggactaccagcggaagcaccctagagaggccggcgattacagcgtgtacgagttcctgtccaagaaagagaaccacttcatctggcggaatcaccctgagtacccctacctgtacgccaccttctgcgagatcgacaagaaaaagaaggacgccaagcagcaggccaccttcacactggccgatcctatcaatcaccctctgtgggtccgattcgaggaaagaagcggcagcaacctgaacaagtacagaatcctgaccgagcagctgcacaccgagaagctgaagaaaaagctgacagtgcagctggaccggctgatctaccctacagaatctggcggctgggaagagaagggcaaagtggacattgtgctgctgcccagccggcagttctacaaccagatcttcctggacatcgaggaaaagggcaagcacgccttcacctacaaggatgagagcatcaagttccctctgaagggcacactcggcggagccagagtgcagttcgacagagatcacctgagaagataccctcacaaggtggaaagcggcaacgtgggcagaatctacttcaacatgaccgtgaacatcgagcctacagagtccccagtgtccaagtctctgaagatccaccgggacgacttccccaaggtggtcaacttcaagcccaaagaactgaccgagtggatcaaggacagcaagggcaagaaactgaagtccggcatcgagtccctggaaatcggcctgagagtgatgagcatcgacctgggacagagacaggccgctgccgcctctattttcgaggtggtggatcagaagcccgacatcgaaggcaagctgtttttcccaatcaagggcaccgagctgtatgccgtgcacagagccagcttcaacatcaagctgcccggcgagacactggtcaagagcagagaagtgctgcggaaggccagagaggacaatctgaaactgatgaaccagaagctcaacttcctgcggaacgtgctgcacttccagcagttcgaggacatcaccgagagagagaagcgggtcaccaagtggatcagcagacaagagaacagcgacgtgcccctggtgtaccaggatgagctgatccagatccgcgagctgatgtacaagccttacaaggactgggtcgccttcctgaagcagctccacaagagactggaagtcgagatcggcaaagaagtgaagcactggcggaagtccctgagcgacggaagaaagggcctgtacggcatctccctgaagaacatcgacgagatcgatcggacccggaagttcctgctgagatggtccctgaggcctaccgaacctggcgaagtgcgtagactggaacccggccagagattcgccatcgaccagctgaatcacctgaacgccctgaaagaagatcggctgaagaagatggccaacaccatcatcatgcacgccctgggctactgctacgacgtgcggaagaagaaatggcaggctaagaaccccgcctgccagatcatcctgttcgaggatctgagcaactacaacccctacgaggaaaggtcccgcttcgagaacagcaagctcatgaagtggtccagacgcgagatccccagacaggttgcactgcagggcgagatctatggcctgcaagtgggagaagtgggcgctcagttcagcagcagattccacgccaagacaggcagccctggcatcagatgtagcgtcgtgaccaaagagaagctgcaggacaatcggttcttcaagaatctgcagagagagggcagactgaccctggacaaaatcgccgtgctgaaagagggcgatctgtacccagacaaaggcggcgagaagttcatcagcctgagcaaggatcggaagtgcgtgaccacacacgccgacatcaacgccgctcagaacctgcagaagcggttctggacaagaacccacggcttctacaaggtgtactgcaaggcctaccaggtggacggaggctctggaggaagctccgaagtcgagttttcccatgagtactggatgagacacgcattgactctcgcaaagagggctcgagatgaacgcgaggtgcccgtgggggcagtactcgtgctcaacaatcgcgtaatcggcgaaggttggaatagggcaatcggactccacgaccccactgcacatgcggaaatcatggcccttcgacagggagggcttgtgatgcagaattatcgactttatgatgcgacgctgtacgtcacgtttgaaccttgcgtaatgtgcgcgggagctatgattcactcccgcattggacgagttgtattcggtgttcgcaacgccaagacgggtgccgcaggttcactgatggacgtgctgcatcatccaggcatgaaccaccgggtagaaatcacagaaggcatattggcggacgaatgtgcggcgctgttgtgtcgtttttttcgcatgcccaggcgggtctttaacgcccagaaaaaagcacaatcctctactgacggctcttctggatctgaaacacctggcacaagcgagagcgccacccctgagagctctggcggccagaccgtgtacatccctgagagcaaggaccagaagcagaagatcatcgaagagttcggcgagggctacttcattctgaaggacggggtgtacgaatgggtcaacgccggcaagctgaaaatcaagaagggcagctccaagcagagcagcagcgagctggtggatagcgacatcctgaaagacagcttcgacctggcctccgagctgaaaggcgaaaagctgatgctgtacagggaccccagcggcaatgtgttccccagcgacaaatggatggccgctggcgtgttcttcggaaagctggaacgcatcctgatcagcaagctgaccaaccagtactccatcagcaccatcgaggacgacagcagcaagcagtctatgaaaaggccggcggccacgaaaaaggccggccaggcaaaaaagaaaaagggatcctacccatacgatgttccagattacgcttatccctacgacgtgcctgattatgcatacccatatgatgtccccgactatgcctaa

SEQ ID NO: 106 - protein, 1361 aa, Artificial Sequence
  Description of Artificial Sequence: Synthetic polypeptide
MAPKKKRKVGIHGVPAAATRSFILKIEPNEEVKKGLWKTHEVLNHGIAYYMNILKLIRQEAIYEHHEQDPKNPKKVSKAEIQAELWDFVLKMQKCNSFTHEVDKDEVFNILRELYEELVPSSVEKKGEANQLSNKFLYPLVDPNSQSGKGTASSGRKPRWYNLKIAGDPSWEEEKKKWEEDKKKDPLAKILGKLAEYGLIPLFIPYTDSNEPIVKEIKWMEKSRNQSVRRLDKDMFIQALERFLSWESWNLKVKEEYEKVEKEYKTLEERIKEDIQALKALEQYEKERQEQLLRDTLNTNEYRLSKRGLRGWREIIQKWLKMDENEPSEKYLEVFKDYQRKHPREAGDYSVYEFLSKKENHFIWRNHPEYPYLYATFCEIDKKKKDAKQQATFTLADPINHPLWVRFEERSGSNLNKYRILTEQLHTEKLKKKLTVQLDRLIYPTESGGWEEKGKVDIVLLPSRQFYNQIFLDIEEKGKHAFTYKDESIKFPLKGTLGGARVQFDRDHLRRYPHKVESGNVGRIYFNMTVNIEPTESPVSKSLKIHRDDFPKVVNFKPKELTEWIKDSKGKKLKSGIESLEIGLRVMSIDLGQRQAAAASIFEVVDQKPDIEGKLFFPIKGTELYAVHRASFNIKLPGETLVKSREVLRKAREDNLKLMNQKLNFLRNVLHFQQFEDITEREKRVTKWISRQENSDVPLVYQDELIQIRELMYKPYKDWVAFLKQLHKRLEVEIGKEVKHWRKSLSDGRKGLYGISLKNIDEIDRTRKFLLRWSLRPTEPGEVRRLEPGQRFAIDQLNHLNALKEDRLKKMANTIIMHALGYCYDVRKKKWQAKNPACQIILFEDLSNYNPYEERSRFENSKLMKWSRREIPRQVALQGEIYGLQVGEVGAQFSSRFHAKTGSPGIRCSVVTKEKLQDNRFFKNLQREGRLTLDKIAVLKEGDLYPDKGGEKFISLSKDRKCVTTHADINAAQNLQKRFWTRTHGFYKVYCKAYQVDGGSGGSSEVEFSHEYWMRHALTLAKRARDEREVPVGAVLVLNNRVIGEGWNRAIGLHDPTAHAEIMALRQGGLVMQNYRLYDATLYVTFEPCVMCAGAMIHSRIGRVVFGVRNAKTGAAGSLMDVLHHPGMNHRVEITEGILADECAALLCRFFRMPRRVFNAQKKAQSSTDGSSGSETPGTSESATPESSGGQTVYIPESKDQKQKIIEEFGEGYFILKDGVYEWVNAGKLKIKKGSSKQSSSELVDSDILKDSFDLASELKGEKLMLYRDPSGNVFPSDKWMAAGVFFGKLERILISKLTNQYSISTIEDDSSKQSMKRPAATKKAGQAKKKKGSYPYDVPDYAYPYDVPDYAYPYDVPDYA

SEQ ID NO: 107 - DNA, 4092 bp, Artificial Sequence
  Description of Artificial Sequence: Synthetic polynucleotide
gccaccatggccccaaagaagaagcggaaggtcggtatccacggagtcccagcagccgccaccagatccttcatcctgaagatcgagcccaacgaggaagtgaagaaaggcctctggaaaacccacgaggtgctgaaccacggaatcgcctactacatgaatatcctgaagctgatccggcaagaggccatctacgagcaccacgagcaggaccccaagaatcccaagaaggtgtccaaggccgagatccaggccgagctgtgggatttcgtgctgaagatgcagaagtgcaacagcttcacacacgaggtggacaaggacgaggtgttcaacatcctgagagagctgtacgaggaactggtgcccagcagcgtggaaaagaagggcgaagccaaccagctgagcaacaagtttctgtaccctctggtggaccccaacagccagtctggaaagggaacagccagcagcggcagaaagcccagatggtacaacctgaagattgccggcgatccctcctgggaagaagagaagaagaagtgggaagaagataagaaaaaggacccgctggccaagatcctgggcaagctggctgagtacggactgatccctctgttcatcccctacaccgacagcaacgagcccatcgtgaaagaaatcaagtggatggaaaagtcccggaaccagagcgtgcggcggctggataaggacatgttcattcaggccctggaacggttcctgagctgggagagctggaacctgaaagtgaaagaggaatacgagaaggtcgagaaagagtacaagaccctggaagagaggatcaaagaggacatccaggctctgaaggctctggaacagtatgagaaagagcggcaagaacagctgctgcgggacaccctgaacaccaacgagtaccggctgagcaagagaggccttagaggctggcgggaaatcatccagaaatggctgaaaatggacgagaacgagccctccgagaagtacctggaagtgttcaaggactaccagcggaagcaccctagagaggccggcgattacagcgtgtacgagttcctgtccaagaaagagaaccacttcatctggcggaatcaccctgagtacccctacctgtacgccaccttctgcgagatcgacaagaaaaagaaggacgccaagcagcaggccaccttcacactggccgatcctatcaatcaccctctgtgggtccgattcgaggaaagaagcggcagcaacctgaacaagtacagaatcctgaccgagcagctgcacaccgagaagctgaagaaaaagctgacagtgcagctggaccggctgatctaccctacagaatctggcggctgggaagagaagggcaaagtggacattgtgctgctgcccagccggcagttctacaaccagatcttcctggacatcgaggaaaagggcaagcacgccttcacctacaaggatgagagcatcaagttccctctgaagggcacactcggcggagccagagtgcagttcgacagagatcacctgagaagataccctcacaaggtggaaagcggcaacgtgggcagaatctacttcaacatgaccgtgaacatcgagcctacagagtccccagtgtccaagtctctgaagatccaccgggacgacttccccaaggtggtcaacttcaagcccaaagaactgaccgagtggatcaaggacagcaagggcaagaaactgaagtccggcatcgagtccctggaaatcggcctgagagtgatgagcatcgacctgggacagagacaggccgctgccgcctctattttcgaggtggtggatcagaagcccgacatcgaaggcaagctgtttttcccaatcaagggcaccgagctgtatgccgtgcacagagccagcttcaacatcaagctgcccggcgagacactggtcaagagcagagaagtgctgcggaaggccagagaggacaatctgaaactgatgaaccagaagctcaacttcctgcggaacgtgctgcacttccagcagttcgaggacatcaccgagagagagaagcgggtcaccaagtggatcagcagacaagagaacagcgacgtgcccctggtgtaccaggatgagctgatccagatccgcgagctgatgtacaagccttacaaggactgggtcgccttcctgaagcagctccacaagagactggaagtcgagatcggcaaagaagtgaagcactggcggaagtccctgagcgacggaagaaagggcctgtacggcatctccctgaagaacatcgacgagatcgatcggacccggaagttcctgctgagatggtccctgaggcctaccgaacctggcgaagtgcgtagactggaacccggccagagattcgccatcgaccagctgaatcacctgaacgccctgaaagaagatcggctgaagaagatggccaacaccatcatcatgcacgccctgggctactgctacgacgtgcggaagaagaaatggcaggctaagaaccccgcctgccagatcatcctgttcgaggatctgagcaactacaacccctacgaggaaaggtcccgcttcgagaacagcaagctcatgaagtggtccagacgcgagatccccagacaggttgcactgcagggcgagatctatggcctgcaagtgggagaagtgggcgctcagttcagcagcagattccacgccaagacaggcagccctggcatcagatgtagcgtcgtgaccaaagagaagctgcaggacaatcggttcttcaagaatctgcagagagagggcagactgaccctggacaaaatcgccgtgctgaaagagggcgatctgtacccagacaaaggcggcgagaagttcatcagcctgagcaaggatcggaagtgcgtgaccacacacgccgacatcaacgccgctcagaacctgcagaagcggttctggacaagaacccacggcttctacaaggtgtactgcaaggcctaccaggtggacggccagaccgtgtacatccctgagagcaaggaccagaagcagaagatcatcgaagagttcggcgagggctacttcattctgaaggacggggtgtacgaatgggtcaacgccggcaagggaggctctggaggaagctccgaagtcgagttttcccatgagtactggatgagacacgcattgactctcgcaaagagggctcgagatgaacgcgaggtgcccgtgggggcagtactcgtgctcaacaatcgcgtaatcggcgaaggttggaatagggcaatcggactccacgaccccactgcacatgcggaaatcatggcccttcgacagggagggcttgtgatgcagaattatcgactttatgatgcgacgctgtacgtcacgtttgaaccttgcgtaatgtgcgcgggagctatgattcactcccgcattggacgagttgtattcggtgttcgcaacgccaagacgggtgccgcaggttcactgatggacgtgctgcatcatccaggcatgaaccaccgggtagaaatcacagaaggcatattggcggacgaatgtgcggcgctgttgtgtcgtttttttcgcatgcccaggcgggtctttaacgcccagaaaaaagcacaatcctctactgacggctcttctggatctgaaacacctggcacaagcgagagcgccacccctgagagctctggcctgaaaatcaagaagggcagctccaagcagagcagcagcgagctggtggatagcgacatcctgaaagacagcttcgacctggcctccgagctgaaaggcgaaaagctgatgctgtacagggaccccagcggcaatgtgttccccagcgacaaatggatggccgctggcgtgttcttcggaaagctggaacgcatcctgatcagcaagctgaccaaccagtactccatcagcaccatcgaggacgacagcagcaagcagtctatgaaaaggccggcggccacgaaaaaggccggccaggcaaaaaagaaaaagggatcctacccatacgatgttccagattacgcttatccctacgacgtgcctgattatgcatacccatatgatgtccccgactatgcctaa

SEQ ID NO: 108 - protein, 1361 aa, Artificial Sequence
  Description of Artificial Sequence: Synthetic polypeptide
MAPKKKRKVGIHGVPAAATRSFILKIEPNEEVKKGLWKTHEVLNHGIAYYMNILKLIRQEAIYEHHEQDPKNPKKVSKAEIQAELWDFVLKMQKCNSFTHEVDKDEVFNILRELYEELVPSSVEKKGEANQLSNKFLYPLVDPNSQSGKGTASSGRKPRWYNLKIAGDPSWEEEKKKWEEDKKKDPLAKILGKLAEYGLIPLFIPYTDSNEPIVKEIKWMEKSRNQSVRRLDKDMFIQALERFLSWESWNLKVKEEYEKVEKEYKTLEERIKEDIQALKALEQYEKERQEQLLRDTLNTNEYRLSKRGLRGWREIIQKWLKMDENEPSEKYLEVFKDYQRKHPREAGDYSVYEFLSKKENHFIWRNHPEYPYLYATFCEIDKKKKDAKQQATFTLADPINHPLWVRFEERSGSNLNKYRILTEQLHTEKLKKKLTVQLDRLIYPTESGGWEEKGKVDIVLLPSRQFYNQIFLDIEEKGKHAFTYKDESIKFPLKGTLGGARVQFDRDHLRRYPHKVESGNVGRIYFNMTVNIEPTESPVSKSLKIHRDDFPKVVNFKPKELTEWIKDSKGKKLKSGIESLEIGLRVMSIDLGQRQAAAASIFEVVDQKPDIEGKLFFPIKGTELYAVHRASFNIKLPGETLVKSREVLRKAREDNLKLMNQKLNFLRNVLHFQQFEDITEREKRVTKWISRQENSDVPLVYQDELIQIRELMYKPYKDWVAFLKQLHKRLEVEIGKEVKHWRKSLSDGRKGLYGISLKNIDEIDRTRKFLLRWSLRPTEPGEVRRLEPGQRFAIDQLNHLNALKEDRLKKMANTIIMHALGYCYDVRKKKWQAKNPACQIILFEDLSNYNPYEERSRFENSKLMKWSRREIPRQVALQGEIYGLQVGEVGAQFSSRFHAKTGSPGIRCSVVTKEKLQDNRFFKNLQREGRLTLDKIAVLKEGDLYPDKGGEKFISLSKDRKCVTTHADINAAQNLQKRFWTRTHGFYKVYCKAYQVDGQTVYIPESKDQKQKIIEEFGEGYFILKDGVYEWVNAGKGGSGGSSEVEFSHEYWMRHALTLAKRARDEREVPVGAVLVLNNRVIGEGWNRAIGLHDPTAHAEIMALRQGGLVMQNYRLYDATLYVTFEPCVMCAGAMIHSRIGRVVFGVRNAKTGAAGSLMDVLHHPGMNHRVEITEGILADECAALLCRFFRMPRRVFNAQKKAQSSTDGSSGSETPGTSESATPESSGLKIKKGSSKQSSSELVDSDILKDSFDLASELKGEKLMLYRDPSGNVFPSDKWMAAGVFFGKLERILISKLTNQYSISTIEDDSSKQSMKRPAATKKAGQAKKKKGSYPYDVPDYAYPYDVPDYAYPYDVPDYA

SEQ ID NO: 109 - protein, 7 aa, Artificial Sequence
  Description of Artificial Sequence: Synthetic peptide
GGGSGGS

SEQ ID NO: 110 - protein, 1368 aa, Streptococcus pyogenes
MDKKYSIGLAIGTNSVGWAVITDEYKVPSKKFKVLGNTDRHSIKKNLIGALLFDSGETAEATRLKRTARRRYTRRKNRICYLQEIFSNEMAKVDDSFFHRLEESVLVEEDKKHERHPIFGNIVDEVAYHEKYPTIYHLRKKLVDSTDKADLRLIYLALAHMIKFRGHFLIEGDLNPDNSDVDKLFIQLVQTYNQLFEENPINASGVDAKAILSARLSKSRRLENLIAQLPGEKKNGLFGNLIALSLGLTPNFKSNFDLAEDAKLQLSKDTYDDDLDNLLAQIGDQYADLFLAAKNLSDAILLSDILRVNTEITKAPLSASMIKRYDEHHQDLTLLKALVRQQLPEKYKEIFFDQSKNGYAGYIDGGASQEEFYKFIKPILEKMDGTEELLVKLNREDLLRKQRTFDNGSIPHQIHLGELHAILRRQEDFYPFLKDNREKIEKILTFRIPYYVGPLARGNSRFAWMTRKSEETITPWNFEEVVDKGASAQSFIERMTNFDKNLPNEKVLPKHSLLYEYFTVYNELTKVKYVTEGMRKPAFLSGEQKKAIVDLLFKTNRKVTVKQLKEDYFKKIECFDSVEISGVEDRFNASLGTYHDLLKIIKDKDFLDNEENEDILEDIVLTLTLFEDREMIEERLKTYAHLFDDKVMKQLKRRRYTGWGRLSRKLINGIRDKQSGKTILDFLKSDGFANRNFMQLIHDDSLTFKEDIQKAQVSGQGDSLHEHIANLAGSPAIKKGILQTVKVVDELVKVMGRHKPENIVIEMARENQTTQKGQKNSRERMKRIEEGIKELGSQILKEHPVENTQLQNEKLYLYYLQNGRDMYVDQELDINRLSDYDVDHIVPQSFLKDDSIDNKVLTRSDKNRGKSDNVPSEEVVKKMKNYWRQLLNAKLITQRKFDNLTKAERGGLSELDKAGFIKRQLVETRQITKHVAQILDSRMNTKYDENDKLIREVKVITLKSKLVSDFRKDFQFYKVREINNYHHAHDAYLNAVVGTALIKKYPKLESEFVYGDYKVYDVRKMIAKSEQEIGKATAKYFFYSNIMNFFKTEITLANGEIRKRPLIETNGETGEIVWDKGRDFATVRKVLSMPQVNIVKKTEVQTGGFSKESILPKRNSDKLIARKKDWDPKKYGGFESPTVAYSVLVVAKVEKGKSKKLKSVKELLGITIMERSSFEKNPIDFLEAKGYKEVKKDLIIKLPKYSLFELENGRKRMLASAGELQKGNELALPSKYVNFLYLASHYEKLKGSPEDNEQKQLFVEQHKHYLDEIIEQISEFSKRVILADANLDKVLSAYNKHRDKPIREQAENIIHLFTLTNLGAPAAFKYFDTTIDRKQYRSTKEVLDATLIHQSITGLYETRIDLSQLGGD

SEQ ID NO: 111 - protein, 1368 aa, Streptococcus pyogenes
MDKKYSIGLAIGTNSVGWAVITDEYKVPSKKFKVLGNTDRHSIKKNLIGALLFDSGETAEATRLKRTARRRYTRRKNRICYLQEIFSNEMAKVDDSFFHRLEESFLVEEDKKHERHPIFGNIVDEVAYHEKYPTIYHLRKKLVDSTDKADLRLIYLALAHMIKFRGHFLIEGDLNPDNSDVDKLFIQLVQTYNQLFEENPINASGVDAKAILSARLSKSRRLENLIAQLPGEKKNGLFGNLIALSLGLTPNFKSNFDLAEDAKLQLSKDTYDDDLDNLLAQIGDQYADLFLAAKNLSDAILLSDILRVNTEITKAPLSASMIKRYDEHHQDLTLLKALVRQQLPEKYKEIFFDQSKNGYAGYIDGGASQEEFYKFIKPILEKMDGTEELLVKLNREDLLRKQRTFDNGSIPHQIHLGELHAILRRQEDFYPFLKDNREKIEKILTFRIPYYVGPLARGNSRFAWMTRKSEETITPWNFEEVVDKGASAQSFIERMTNFDKNLPNEKVLPKHSLLYEYFTVYNELTKVKYVTEGMRKPAFLSGEQKKAIVDLLFKTNRKVTVKQLKEDYFKKIECFDSVEISGVEDRFNASLGTYHDLLKIIKDKDFLDNEENEDILEDIVLTLTLFEDREMIEERLKTYAHLFDDKVMKQLKRRRYTGWGRLSRKLINGIRDKQSGKTILDFLKSDGFANRNFMQLIHDDSLTFKEDIQKAQVSGQGDSLHEHIANLAGSPAIKKGILQTVKVVDELVKVMGRHKPENIVIEMARENQTTQKGQKNSRERMKRIEEGIKELGSQILKEHPVENTQLQNEKLYLYYLQNGRDMYVDQELDINRLSDYDVDHIVPQSFLKDDSIDNKVLTRSDKNRGKSDNVPSEEVVKKMKNYWRQLLNAKLITQRKFDNLTKAERGGLSELDKAGFIKRQLVETRQITKHVAQILDSRMNTKYDENDKLIREVKVITLKSKLVSDFRKDFQFYKVREINNYHHAHDAYLNAVVGTALIKKYPKLESEFVYGDYKVYDVRKMIAKSEQEIGKATAKYFFYSNIMNFFKTEITLANGEIRKRPLIETNGETGEIVWDKGRDFATVRKVLSMPQVNIVKKTEVQTGGFSKESILPKRNSDKLIARKKDWDPKKYGGFVSPTVAYSVLVVAKVEKGKSKKLKSVKELLGITIMERSSFEKNPIDFLEAKGYKEVKKDLIIKLPKYSLFELENGRKRMLASAGELQKGNELALPSKYVNFLYLASHYEKLKGSPEDNEQKQLFVEQHKHYLDEIIEQISEFSKRVILADANLDKVLSAYNKHRDKPIREQAENIIHLFTLTNLGAPAAFKYFDTTIDRKQYRSTKEVLDATLIHQSITGLYETRIDLSQLGGD

SEQ ID NO: 112 - protein, 1368 aa, Streptococcus pyogenes
MDKKYSIGLAIGTNSVGWAVITDEYKVPSKKFKVLGNTDRHSIKKNLIGALLFDSGETAEATRLKRTARRRYTRRKNRICYLQEIFSNEMAKVDDSFFHRLEESFLVEEDKKHERHPIFGNIVDEVAYHEKYPTIYHLRKKLVDSTDKADLRLIYLALAHMIKFRGHFLIEGDLNPDNSDVDKLFIQLVQTYNQLFEENPINASGVDAKAILSARLSKSRRLENLIAQLPGEKKNGLFGNLIALSLGLTPNFKSNFDLAEDAKLQLSKDTYDDDLDNLLAQIGDQYADLFLAAKNLSDAILLSDILRVNTEITKAPLSASMIKRYDEHHQDLTLLKALVRQQLPEKYKEIFFDQSKNGYAGYIDGGASQEEFYKFIKPILEKMDGTEELLVKLNREDLLRKQRTFDNGSIPHQIHLGELHAILRRQEDFYPFLKDNREKIEKILTFRIPYYVGPLARGNSRFAWMTRKSEETITPWNFEEVVDKGASAQSFIERMTNFDKNLPNEKVLPKHSLLYEYFTVYNELTKVKYVTEGMRKPAFLSGEQKKAIVDLLFKTNRKVTVKQLKEDYFKKIECFDSVEISGVEDRFNASLGTYHDLLKIIKDKDFLDNEENEDILEDIVLTLTLFEDREMIEERLKTYAHLFDDKVMKQLKRRRYTGWGRLSRKLINGIRDKQSGKTILDFLKSDGFANRNFMQLIHDDSLTFKEDIQKAQVSGQGDSLHEHIANLAGSPAIKKGILQTVKVVDELVKVMGRHKPENIVIEMARENQTTQKGQKNSRERMKRIEEGIKELGSQILKEHPVENTQLQNEKLYLYYLQNGRDMYVDQELDINRLSDYDVDHIVPQSFLKDDSIDNKVLTRSDKNRGKSDNVPSEEVVKKMKNYWRQLLNAKLITQRKFDNLTKAERGGLSELDKAGFIKRQLVETRQITKHVAQILDSRMNTKYDENDKLIREVKVITLKSKLVSDFRKDFQFYKVREINNYHHAHDAYLNAVVGTALIKKYPKLESEFVYGDYKVYDVRKMIAKSEQEIGKATAKYFFYSNIMNFFKTEITLANGEIRKRPLIETNGETGEIVWDKGRDFATVRKVLSMPQVNIVKKTEVQTGGFSKESILPKRNSDKLIARKKDWDPKKYGGFVSPTVAYSVLVVAKVEKGKSKKLKSVKELLGITIMERSSFEKNPIDFLEAKGYKEVKKDLIIKLPKYSLFELENGRKRMLASARELQKGNELALPSKYVNFLYLASHYEKLKGSPEDNEQKQLFVEQHKHYLDEIIEQISEFSKRVILADANLDKVLSAYNKHRDKPIREQAENIIHLFTLTNLGAPAAFKYFDTTIDRKEYRSTKEVLDATLIHQSITGLYETRIDLSQLGGD

SEQ ID NO: 113 - protein, 1359 aa, Artificial Sequence
  Description of Artificial Sequence: Synthetic polypeptide
MDKKYSIGLDIGTNSVGWAVITDDYKVPSKKFKVLGNTDRHSIKKNLIGALLFGSGETAEATRLKRTARRRYTRRKNRICYLQEIFSNEMAKVDDSFFHRLEESFLVEEDKKHERHPIFGNIVDEVAYHEKYPTIYHLRKKLADSTDKADLRLIYLALAHMIKFRGHFLIEGDLNPDNSDVDKLFIQLVQIYNQLFEENPINASRVDAKAILSARLSKSRRLENLIAQLPGEKRNGLFGNLIALSLGLTPNFKSNFDLAEDAKLQLSKDTYDDDLDNLLAQIGDQYADLFLAAKNLSDAILLSDILRVNSEITKAPLSASMIKRYDEHHQDLTLLKALVRQQLPEKYKEIFFDQSKNGYAGYIDGGASQEEFYKFIKPILEKMDGTEELLVKLNREDLLRKQRTFDNGSIPHQIHLGELHAILRRQEDFYPFLKDNREKIEKILTFRIPYYVGPLARGNSRFAWMTRKSEETITPWNFEEVVDKGASAQSFIERMTNFDKNLPNEKVLPKHSLLYEYFTVYNELTKVKYVTEGMRKPAFLSGEQKKAIVDLLFKTNRKVTVKQLKEDYFKKIECFDSVEISGVEDRFNASLGAYHDLLKIIKDKDFLDNEENEDILEDIVLTLTLFEDRGMIEERLKTYAHLFDDKVMKQLKRRRYTGWGRLSRKLINGIRDKQSGKTILDFLKSDGFANRNFMQLIHDDSLTFKEDIQKAQVSGQGHSLHEQIANLAGSPAIKKGILQTVKIVDELVKVMGHKPENIVIEMARENQTTQKGQKNSRERMKRIEEGIKELGSQILKEHPVENTQLQNEKLYLYYLQNGRDMYVDQELDINRLSDYDVDHIVPQSFIKDDSIDNKVLTRSDKNRGKSDNVPSEEVVKKMKNYWRQLLNAKLITQRKFDNLTKAERGGLSELDKAGFIKRQLVETRQITKHVAQILDSRMNTKYDENDKLIREVKVITLKSKLVSDFRKDFQFYKVREINNYHHAHDAYLNAVVGTALIKKYPKLESEFVYGDYKVYDVRKMIAKSEQEIGKATAKYFFYSNIMNFFKTEITLANGEIRKRPLIETNGETGEIVWDKGRDFATVRKVLSMPQVNIVKKTEIQTVGQNGGLFDDNPKSPLEVTPSKLVPLKKELNPKKYGGYQKPTTAYPVLLITDTKQLIPISVMNKKQFEQNPVKFLRDRGYQQVGKNDFIKLPKYTLVDIGDGIKRLWASSKEIHKGNQLVVSKKSQILLYHAHHLDSDLSNDYLQNHNQQFDVLFNEIISFSKKCKLGKEHIQKIENVYSNKKNSASIEELAESFIKLLGFTQLGATSPFNFLGVKLNQKQYKGKKDYILPCTEGTLIRQSITGLYETRVDLSKIGED

SEQ ID NO: 114 - protein, 1367 aa, Artificial Sequence
  Description of Artificial Sequence: Synthetic polypeptide
DKKYSIGLAIGTNSVGWAVITDEYKVPSKKFKVLGNTDRHSIKKNLIGALLFDSGETAEATRLKRTARRRYTRRKNRICYLQEIFSNEMAKVDDSFFHRLEESFLVEEDKKHERHPIFGNIVDEVAYHEKYPTIYHLRKKLVDSTDKADLRLIYLALAHMIKFRGHFLIEGDLNPDNSDVDKLFIQLVQTYNQLFEENPINASGVDAKAILSARLSKSRRLENLIAQLPGEKKNGLFGNLIALSLGLTPNFKSNFDLAEDAKLQLSKDTYDDDLDNLLAQIGDQYADLFLAAKNLSDAILLSDILRVNTEITKAPLSASMIKRYDEHHQDLTLLKALVRQQLPEKYKEIFFDQSKNGYAGYIDGGASQEEFYKFIKPILEKMDGTEELLVKLNREDLLRKQRTFDNGSIPHQIHLGELHAILRRQEDFYPFLKDNREKIEKILTFRIPYYVGPLARGNSRFAWMTRKSEETITPWNFEEVVDKGASAQSFIERMTAFDKNLPNEKVLPKHSLLYEYFTVYNELTKVKYVTEGMRKPAFLSGEQKKAIVDLLFKTNRKVTVKQLKEDYFKKIECFDSVEISGVEDRFNASLGTYHDLLKIIKDKDFLDNEENEDILEDIVLTLTLFEDREMIEERLKTYAHLFDDKVMKQLKRRRYTGWGALSRKLINGIRDKQSGKTILDFLKSDGFANRNFMALIHDDSLTFKEDIQKAQVSGQGDSLHEHIANLAGSPAIKKGILQTVKVVDELVKVMGRHKPENIVIEMARENQTTQKGQKNSRERMKRIEEGIKELGSQILKEHPVENTQLQNEKLYLYYLQNGRDMYVDQELDINRLSDYDVDHIVPQSFLKDDSIDNKVLTRSDKNRGKSDNVPSEEVVKKMKNYWRQLLNAKLITQRKFDNLTKAERGGLSELDKAGFIKRQLVETRAITKHVAQILDSRMNTKYDENDKLIREVKVITLKSKLVSDFRKDFQFYKVREINNYHHAHDAYLNAVVGTALIKKYPKLESEFVYGDYKVYDVRKMIAKSEQEIGKATAKYFFYSNIMNFFKTEITLANGEIRKRPLIETNGETGEIVWDKGRDFATVRKVLSMPQVNIVKKTEVQTGGFSKESILPKRNSDKLIARKKDWDPKKYGGFDSPTVAYSVLVVAKVEKGKSKKLKSVKELLGITIMERSSFEKNPIDFLEAKGYKEVKKDLIIKLPKYSLFELENGRKRMLASAGELQKGNELALPSKYVNFLYLASHYEKLKGSPEDNEQKQLFVEQHKHYLDEIIEQISEFSKRVILADANLDKVLSAYNKHRDKPIREQAENIIHLFTLTNLGAPAAFKYFDTTIDRKRYTSTKEVLDATLIHQSITGLYETRIDLSQLGGD

SEQ ID NO: 115 - protein, 29 aa, Artificial Sequence
  Description of Artificial Sequence: Synthetic peptide
PKKKRKVEGADKRTADGSEFESPKKKRKV

SEQ ID NO: 116 - protein, 23 aa, Artificial Sequence
  Description of Artificial Sequence: Synthetic peptide
RKSGKIAAIVVKRPRKPKKKRKV

SEQ ID NO: 117 - protein, 178 aa, Escherichia coli
MRRAFITGVFFLSEVEFSHEYWMRHALTLAKRAWDEREVPVGAVLVHNNRVIGEGWNRPIGRHDPTAHAEIMALRQGGLVMQNYRLIDATLYVTLEPCVMCAGAMIHSRIGRVVFGARDAKTGAAGSLMDVLHHPGMNHRVEITEGILADECAALLSDFFRMRRQEIKAQKKAQSSTD

SEQ ID NO: 118 - protein, 167 aa, Escherichia coli; identical to SEQ ID NO: 3

SEQ ID NO: 119 - protein, 8 aa, Artificial Sequence
  Description of Artificial Sequence: Synthetic peptide
SGGSSGGS

SEQ ID NO: 120 - protein, 1609 aa, Artificial Sequence
  Description of Artificial Sequence: Synthetic polypeptide
MSEVEFSHEYWMRHALTLAKRARDEREVPVGAVLVLNNRVIGEGWNRAIGLHDPTAHAEIMALRQGGLVMQNYRLIDATLYVTFEPCVMCAGAMIHSRIGRVVFGVRNAKTGAAGSLMDVLHYPGMNHRVEITEGILADECAALLCTFFRMPRQVFNAQKKAQSSTDSGGSSGGSSGSETPGTSESATPESSGGSSGGSEIGKATAKYFFYSNIMNFFKTEITLANGEIRKRPLIETNGETGEIVWDKGRDFATVRKVLSMPQVNIVKKTEVQTGGFSKESILPKRNSDKLIARKKDWDPKKYGGFMQPTVAYSVLVVAKVEKGKSKKLKSVKELLGITIMERSSFEKNPIDFLEAKGYKEVKKDLIIKLPKYSLFELENGRKRMLASAKFLQKGNELALPSKYVNFLYLASHYEKLKGSPEDNEQKQLFVEQHKHYLDEIIEQISEFSKRVILADANLDKVLSAYNKHRDKPIREQAENIIHLFTLTNLGAPRAFKYFDTTIARKEYRSTKEVLDATLIHQSITGLYETRIDLSQLGGDGGSGGSGGSGGSGGSGGSGGMDKKYSIGLAIGTNSVGWAVITDEYKVPSKKFKVLGNTDRHSIKKNLIGALLFDSGETAEATRLKRTARRRYTRRKNRICYLQEIFSNEMAKVDDSFFHRLEESFLVEEDKKHERHPIFGNIVDEVAYHEKYPTIYHLRKKLVDSTDKADLRLIYLALAHMIKFRGHFLIEGDLNPDNSDVDKLFIQLVQTYNQLFEENPINASGVDAKAILSARLSKSRRLENLIAQLPGEKKNGLFGNLIALSLGLTPNFKSNFDLAEDAKLQLSKDTYDDDLDNLLAQIGDQYADLFLAAKNLSDAILLSDILRVNTEITKAPLSASMIKRYDEHHQDLTLLKALVRQQLPEKYKEIFFDQSKNGYAGYIDGGASQEEFYKFIKPILEKMDGTEELLVKLNREDLLRKQRTFDNGSIPHQIHLGELHAILRRQEDFYPFLKDNREKIEKILTFRIPYYVGPLARGNSRFAWMTRKSEETITPWNFEEVVDKGASAQSFIERMTNFDKNLPNEKVLPKHSLLYEYFTVYNELTKVKYVTEGMRKPAFLSGEQKKAIVDLLFKTNRKVTVKQLKEDYFKKIECFDSVEISGVEDRFNASLGTYHDLLKIIKDKDFLDNEENEDILEDIVLTLTLFEDREMIEERLKTYAHLFDDKVMKQLKRRRYTGWGRLSRKLINGIRDKQSGKTILDFLKSDGFANRNFMQLIHDDSLTFKEDIQKAQVSGQGDSLHEHIANLAGSPAIKKGILQTVKVVDELVKVMGRHKPENIVIEMARENQTTQKGQKNSRERMKRIEEGIKELGSQILKEHPVENTQLQNEKLYLYYLQNGRDMYVDQELDINRLSDYDVDHIVPQSFLKDDSIDNKVLTRSDKNRGKSDNVPSEEVVKKMKNYWRQLLNAKLITQRKFDNLTKAERGGLSELDKAGFIKRQLVETRQITKHVAQILDSRMNTKYDENDKLIREVKVITLKSKLVSDFRKDFQFYKVREINNYHHAHDAYLNAVVGTALIKKYPKLESEFVYGDYKVYDVRKMIAKSEQEGADKRTADGSEFESPKKKRKV

SEQ ID NO: 121 - protein, 1807 aa, Artificial Sequence
  Description of Artificial Sequence: Synthetic polypeptide
MSEVEFSHEYWMRHALTLAKRAWDEREVPVGAVLVHNNRVIGEGWNRPIGRHDPTAHAEIMALRQGGLVMQNYRLIDATLYVTLEPCVMCAGAMIHSRIGRVVFGARDAKTGAAGSLMDVLHHPGMNHRVEITEGILADECAALLSDFFRMRRQEIKAQKKAQSSTDGGSSGGSSGSETPGTSESATPESSGGSSGGSMSEVEFSHEYWMRHALTLAKRARDEREVPVGAVLVLNNRVIGEGWNRAIGLHDPTAHAEIMALRQGGLVMQNYRLIDATLYVTFEPCVMCAGAMIHSRIGRVVFGVRNAKTGAAGSLMDVLHYPGMNHRVEITEGILADECAALLCTFFRMPRQVFNAQKKAQSSTDSGGSSGGSSGSETPGTSESATPESSGGSSGGSEIGKATAKYFFYSNIMNFFKTEITLANGEIRKRPLIETNGETGEIVWDKGRDFATVRKVLSMPQVNIVKKTEVQTGGFSKESILPKRNSDKLIARKKDWDPKKYGGFMQPTVAYSVLVVAKVEKGKSKKLKSVKELLGITIMERSSFEKNPIDFLEAKGYKEVKKDLIIKLPKYSLFELENGRKRMLASAKFLQKGNELALPSKYVNFLYLASHYEKLKGSPEDNEQKQLFVEQHKHYLDEIIEQISEFSKRVILADANLDKVLSAYNKHRDKPIREQAENIIHLFTLTNLGAPRAFKYFDTTIARKEYRSTKEVLDATLIHQSITGLYETRIDLSQLGGDGGSGGSGGSGGSGGSGGSGGMDKKYSIGLAIGTNSVGWAVITDEYKVPSKKFKVLGNTDRHSIKKNLIGALLFDSGETAEATRLKRTARRRYTRRKNRICYLQEIFSNEMAKVDDSFFHRLEESFLVEEDKKHERHPIFGNIVDEVAYHEKYPTIYHLRKKLVDSTDKADLRLIYLALAHMIKFRGHFLIEGDLNPDNSDVDKLFIQLVQTYNQLFEENPINASGVDAKAILSARLSKSRRLENLIAQLPGEKKNGLFGNLIALSLGLTPNFKSNFDLAEDAKLQLSKDTYDDDLDNLLAQIGDQYADLFLAAKNLSDAILLSDILRVNTEITKAPLSASMIKRYDEHHQDLTLLKALVRQQLPEKYKEIFFDQSKNGYAGYIDGGASQEEFYKFIKPILEKMDGTEELLVKLNREDLLRKQRTFDNGSIPHQIHLGELHAILRRQEDFYPFLKDNREKIEKILTFRIPYYVGPLARGNSRFAWMTRKSEETITPWNFEEVVDKGASAQSFIERMTNFDKNLPNEKVLPKHSLLYEYFTVYNELTKVKYVTEGMRKPAFLSGEQKKAIVDLLFKTNRKVTVKQLKEDYFKKIECFDSVEISGVEDRFNASLGTYHDLLKIIKDKDFLDNEENEDILEDIVLTLTLFEDREMIEERLKTYAHLFDDKVMKQLKRRRYTGWGRLSRKLINGIRDKQSGKTILDFLKSDGFANRNFMQLIHDDSLTFKEDIQKAQVSGQGDSLHEHIANLAGSPAIKKGILQTVKVVDELVKVMGRHKPENIVIEMARENQTTQKGQKNSRERMKRIEEGIKELGSQILKEHPVENTQLQNEKLYLYYLQNGRDMYVDQELDINRLSDYDVDHIVPQSFLKDDSIDNKVLTRSDKNRGKSDNVPSEEVVKKMKNYWRQLLNAKLITQRKFDNLTKAERGGLSELDKAGFIKRQLVETRQITKHVAQILDSRMNTKYDENDKLIREVKVITLKSKLVSDFRKDFQFYKVREINNYHHAHDAYLNAVVGTALIKKYPKLESEFVYGDYKVYDVRKMIAKSEQEGADKRTADGSEFESPKKKRKV

SEQ ID NO: 122 - protein, 1588 aa, Artificial Sequence
  Description of Artificial Sequence: Synthetic polypeptide
MSEVEFSHEYWMRHALTLAKRARDEREVPVGAVLVLNNRVIGEGWNRAIGLHDPTAHAEIMALRQGGLVMQNYRLIDATLYVTFEPCVMCAGAMIHSRIGRVVFGVRNAKTGAAGSLMDVLHHPGMNHRVEITEGILADECAALLCRFFRMPRRVFNAQKKAQSSTDSGGSSGGSSGSETPGTSESATPESSGGSSGGSDKKYSIGLAIGTNSVGWAVITDEYKVPSKKFKVLGNTDRHSIKKNLIGALLFDSGETAEATRLKRTARRRYTRRKNRICYLQEIFSNEMAKVDDSFFHRLEESFLVEEDKKHERHPIFGNIVDEVAYHEKYPTIYHLRKKLVDSTDKADLRLIYLALAHMIKFRGHFLIEGDLNPDNSDVDKLFIQLVQTYNQLFEENPINASGVDAKAILSARLSKSRRLENLIAQLPGEKKNGLFGNLIALSLGLTPNFKSNFDLAEDAKLQLSKDTYDDDLDNLLAQIGDQYADLFLAAKNLSDAILLSDILRVNTEITKAPLSASMIKRYDEHHQDLTLLKALVRQQLPEKYKEIFFDQSKNGYAGYIDGGASQEEFYKFIKPILEKMDGTEELLVKLNREDLLRKQRTFDNGSIPHQIHLGELHAILRRQEDFYPFLKDNREKIEKILTFRIPYYVGPLARGNSRFAWMTRKSEETITPWNFEEVVDKGASAQSFIERMTNFDKNLPNEKVLPKHSLLYEYFTVYNELTKVKYVTEGMRKPAFLSGEQKKAIVDLLFKTNRKVTVKQLKEDYFKKIECFDSVEISGVEDRFNASLGTYHDLLKIIKDKDFLDNEENEDILEDIVLTLTLFEDREMIEERLKTYAHLFDDKVMKQLKRRRYTGWGRLSRKLINGIRDKQSGKTILDFLKSDGFANRNFMQLIHDDSLTFKEDIQKAQVSGQGDSLHEHIANLAGSPAIKKGILQTVKVVDELVKVMGRHKPENIVIEMARENQTTQKGQKNSRERMKRIEEGIKELGSQILKEHPVENTQLQNEKLYLYYLQNGRDMYVDQELDINRLSDYDVDHIVPQSFLKDDSIDNKVLTRSDKNRGKSDNVPSEEVVKKMKNYWRQLLNAKLITQRKFDNLTKAERGGLSELDKAGFIKRQLVETRQITKHVAQILDSRMNTKYDENDKLIREVKVITLKSKLVSDFRKDFQFYKVREINNYHHAHDAYLNAVVGTALIKKYPKLESEFVYGDYKVYDVRKMIAKSEQEIGKATAKYFFYSNIMNFFKTEITLANGEIRKRPLIETNGETGEIVWDKGRDFATVRKVLSMPQVNIVKKTEVQTGGFSKESILPKRNSDKLIARKKDWDPKKYGGFDSPTVAYSVLVVAKVEKGKSKKLKSVKELLGITIMERSSFEKNPIDFLEAKGYKEVKKDLIIKLPKYSLFELENGRKRMLASAGELQKGNELALPSKYVNFLYLASHYEKLKGSPEDNEQKQLFVEQHKHYLDEIIEQISEFSKRVILADANLDKVLSAYNKHRDKPIREQAENIIHLFTLTNLGAPAAFKYFDTTIDRKRYTSTKEVLDATLIHQSITGLYETRIDLSQLGGDEGADKRTADGSEFESPKKKRKV

SEQ ID NO: 123 - protein, 1786 aa, Artificial Sequence
  Description of Artificial Sequence: Synthetic polypeptide
MSEVEFSHEYWMRHALTLAKRAWDEREVPVGAVLVHNNRVIGEGWNRPIGRHDPTAHAEIMALRQGGLVMQNYRLIDATLYVTLEPCVMCAGAMIHSRIGRVVFGARDAKTGAAGSLMDVLHHPGMNHRVEITEGILADECAALLSDFFRMRRQEIKAQKKAQSSTDSGGSSGGSSGSETPGTSESATPESSGGSSGGSSEVEFSHEYWMRHALTLAKRARDEREVPVGAVLVLNNRVIGEGWNRAIGLHDPTAHAEIMALRQGGLVMQNYRLIDATLYVTFEPCVMCAGAMIHSRIGRVVFGVRNAKTGAAGSLMDVLHHPGMNHRVEITEGILADECAALLCRFFRMPRRVFNAQKKAQSSTDSGGSSGGSSGSETPGTSESATPESSGGSSGGSDKKYSIGLAIGTNSVGWAVITDEYKVPSKKFKVLGNTDRHSIKKNLIGALLFDSGETAEATRLKRTARRRYTRRKNRICYLQEIFSNEMAKVDDSFFHRLEESFLVEEDKKHERHPIFGNIVDEVAYHEKYPTIYHLRKKLVDSTDKADLRLIYLALAHMIKFRGHFLIEGDLNPDNSDVDKLFIQLVQTYNQLFEENPINASGVDAKAILSARLSKSRRLENLIAQLPGEKKNGLFGNLIALSLGLTPNFKSNFDLAEDAKLQLSKDTYDDDLDNLLAQIGDQYADLFLAAKNLSDAILLSDILRVNTEITKAPLSASMIKRYDEHHQDLTLLKALVRQQLPEKYKEIFFDQSKNGYAGYIDGGASQEEFYKFIKPILEKMDGTEELLVKLNREDLLRKQRTFDNGSIPHQIHLGELHAILRRQEDFYPFLKDNREKIEKILTFRIPYYVGPLARGNSRFAWMTRKSEETITPWNFEEVVDKGASAQSFIERMTNFDKNLPNEKVLPKHSLLYEYFTVYNELTKVKYVTEGMRKPAFLSGEQKKAIVDLLFKTNRKVTVKQLKEDYFKKIECFDSVEISGVEDRFNASLGTYHDLLKIIKDKDFLDNEENEDILEDIVLTLTLFEDREMIEERLKTYAHLFDDKVMKQLKRRRYTGWGRLSRKLINGIRDKQSGKTILDFLKSDGFANRNFMQLIHDDSLTFKEDIQKAQVSGQGDSLHEHIANLAGSPAIKKGILQTVKVVDELVKVMGRHKPENIVIEMARENQTTQKGQKNSRERMKRIEEGIKELGSQILKEHPVENTQLQNEKLYLYYLQNGRDMYVDQELDINRLSDYDVDHIVPQSFLKDDSIDNKVLTRSDKNRGKSDNVPSEEVVKKMKNYWRQLLNAKLITQRKFDNLTKAERGGLSELDKAGFIKRQLVETRQITKHVAQILDSRMNTKYDENDKLIREVKVITLKSKLVSDFRKDFQFYKVREINNYHHAHDAYLNAVVGTALIKKYPKLESEFVYGDYKVYDVRKMIAKSEQEIGKATAKYFFYSNIMNFFKTEITLANGEIRKRPLIETNGETGEIVWDKGRDFATVRKVLSMPQVNIVKKTEVQTGGFSKESILPKRNSDKLIARKKDWDPKKYGGFDSPTVAYSVLVVAKVEKGKSKKLKSVKELLGITIMERSSFEKNPIDFLEAKGYKEVKKDLIIKLPKYSLFELENGRKRMLASAGELQKGNELALPSKYVNFLYLASHYEKLKGSPEDNEQKQLFVEQHKHYLDEIIEQISEFSKRVILADANLDKVLSAYNKHRDKPIREQAENIIHLFTLTNLGAPAAFKYFDTTIDRKRYTSTKEVLDATLIHQSITGLYETRIDLSQLGGDEGADKRTADGSEFESPKKKRKV

SEQ ID NO: 124 - protein, 1588 aa, Artificial Sequence
  Description of Artificial Sequence: Synthetic polypeptide
MSEVEFSHEYWMRHALTLAKRARDEREVPVGAVLVLNNRVIGEGWNRAIGLHDPTAHAEIMALRQGGLVMQNYRLYDATLYVTFEPCVMCAGAMIHSRIGRVVFGVRNAKTGAAGSLMDVLHHPGMNHRVEITEGILADECAALLCRFFRMPRRVFNAQKKAQSSTDSGGSSGGSSGSETPGTSESATPESSGGSSGGSDKKYSIGLAIGTNSVGWAVITDEYKVPSKKFKVLGNTDRHSIKKNLIGALLFDSGETAEATRLKRTARRRYTRRKNRICYLQEIFSNEMAKVDDSFFHRLEESFLVEEDKKHERHPIFGNIVDEVAYHEKYPTIYHLRKKLVDSTDKADLRLIYLALAHMIKFRGHFLIEGDLNPDNSDVDKLFIQLVQTYNQLFEENPINASGVDAKAILSARLSKSRRLENLIAQLPGEKKNGLFGNLIALSLGLTPNFKSNFDLAEDAKLQLSKDTYDDDLDNLLAQIGDQYADLFLAAKNLSDAILLSDILRVNTEITKAPLSASMIKRYDEHHQDLTLLKALVRQQLPEKYKEIFFDQSKNGYAGYIDGGASQEEFYKFIKPILEKMDGTEELLVKLNREDLLRKQRTFDNGSIPHQIHLGELHAILRRQEDFYPFLKDNREKIEKILTFRIPYYVGPLARGNSRFAWMTRKSEETITPWNFEEVVDKGASAQSFIERMTNFDKNLPNEKVLPKHSLLYEYFTVYNELTKVKYVTEGMRKPAFLSGEQKKAIVDLLFKTNRKVTVKQLKEDYFKKIECFDSVEISGVEDRFNASLGTYHDLLKIIKDKDFLDNEENEDILEDIVLTLTLFEDREMIEERLKTYAHLFDDKVMKQLKRRRYTGWGRLSRKLINGIRDKQSGKTILDFLKSDGFANRNFMQLIHDDSLTFKEDIQKAQVSGQGDSLHEHIANLAGSPAIKKGILQTVKVVDELVKVMGRHKPENIVIEMARENQTTQKGQKNSRERMKRIEEGIKELGSQILKEHPVENTQLQNEKLYLYYLQNGRDMYVDQELDINRLSDYDVDHIVPQSFLKDDSIDNKVLTRSDKNRGKSDNVPSEEVVKKMKNYWRQLLNAKLITQRKFDNLTKAERGGLSELDKAGFIKRQLVETRQITKHVAQILDSRMNTKYDENDKLIREVKVITLKSKLVSDFRKDFQFYKVREINNYHHAHDAYLNAVVGTALIKKYPKLESEFVYGDYKVYDVRKMIAKSEQEIGKATAKYFFYSNIMNFFKTEITLANGEIRKRPLIETNGETGEIVWDKGRDFATVRKVLSMPQVNIVKKTEVQTGGFSKESILPKRNSDKLIARKKDWDPKKYGGFDSPTVAYSVLVVAKVEKGKSKKLKSVKELLGITIMERSSFEKNPIDFLEAKGYKEVKKDLIIKLPKYSLFELENGRKRMLASAGELQKGNELALPSKYVNFLYLASHYEKLKGSPEDNEQKQLFVEQHKHYLDEIIEQISEFSKRVILADANLDKVLSAYNKHRDKPIREQAENIIHLFTLTNLGAPAAFKYFDTTIDRKRYTSTKEVLDATLIHQSITGLYETRIDLSQLGGDEGADKRTADGSEFESPKKKRKV

SEQ ID NO: 125 - protein, 1786 aa, Artificial Sequence
  Description of Artificial Sequence: Synthetic polypeptide
MSEVEFSHEYWMRHALTLAKRAWDEREVPVGAVLVHNNRVIGEGWNRPIGRHDPTAHAEIMALRQGGLVMQNYRLIDATLYVTLEPCVMCAGAMIHSRIGRVVFGARDAKTGAAGSLMDVLHHPGMNHRVEITEGILADECAALLSDFFRMRRQEIKAQKKAQSSTDSGGSSGGSSGSETPGTSESATPESSGGSSGGSSEVEFSHEYWMRHALTLAKRARDEREVPVGAVLVLNNRVIGEGWNRAIGLHDPTAHAEIMALRQGGLVMQNYRLYDATLYVTFEPCVMCAGAMIHSRIGRVVFGVRNAKTGAAGSLMDVLHHPGMNHRVEITEGILADECAALLCRFFRMPRRVFNAQKKAQSSTDSGGSSGGSSGSETPGTSESATPESSGGSSGGSDKKYSIGLAIGTNSVGWAVITDEYKVPSKKFKVLGNTDRHSIKKNLIGALLFDSGETAEATRLKRTARRRYTRRKNRICYLQEIFSNEMAKVDDSFFHRLEESFLVEEDKKHERHPIFGNIVDEVAYHEKYPTIYHLRKKLVDSTDKADLRLIYLALAHMIKFRGHFLIEGDLNPDNSDVDKLFIQLVQTYNQLFEENPINASGVDAKAILSARLSKSRRLENLIAQLPGEKKNGLFGNLIALSLGLTPNFKSNFDLAEDAKLQLSKDTYDDDLDNLLAQIGDQYADLFLAAKNLSDAILLSDILRVNTEITKAPLSASMIKRYDEHHQDLTLLKALVRQQLPEKYKEIFFDQSKNGYAGYIDGGASQEEFYKFIKPILEKMDGTEELLVKLNREDLLRKQRTFDNGSIPHQIHLGELHAILRRQEDFYPFLKDNREKIEKILTFRIPYYVGPLARGNSRFAWMTRKSEETITPWNFEEVVDKGASAQSFIERMTNFDKNLPNEKVLPKHSLLYEYFTVYNELTKVKYVTEGMRKPAFLSGEQKKAIVDLLFKTNRKVTVKQLKEDYFKKIECFDSVEISGVEDRFNASLGTYHDLLKIIKDKDFLDNEENEDILEDIVLTLTLFEDREMIEERLKTYAHLFDDKVMKQLKRRRYTGWGRLSRKLINGIRDKQSGKTILDFLKSDGFANRNFMQLIHDDSLTFKEDIQKAQVSGQGDSLHEHIANLAGSPAIKKGILQTVKVVDELVKVMGRHKPENIVIEMARENQTTQKGQKNSRERMKRIEEGIKELGSQILKEHPVENTQLQNEKLYLYYLQNGRDMYVDQELDINRLSDYDVDHIVPQSFLKDDSIDNKVLTRSDKNRGKSDNVPSEEVVKKMKNYWRQLLNAKLITQRKFDNLTKAERGGLSELDKAGFIKRQLVETRQITKHVAQILDSRMNTKYDENDKLIREVKVITLKSKLVSDFRKDFQFYKVREINNYHHAHDAYLNAVVGTALIKKYPKLESEFVYGDYKVYDVRKMIAKSEQEIGKATAKYFFYSNIMNFFKTEITLANGEIRKRPLIETNGETGEIVWDKGRDFATVRKVLSMPQVNIVKKTEVQTGGFSKESILPKRNSDKLIARKKDWDPKKYGGFDSPTVAYSVLVVAKVEKGKSKKLKSVKELLGITIMERSSFEKNPIDFLEAKGYKEVKKDLIIKLPKYSLFELENGRKRMLASAGELQKGNELALPSKYVNFLYLASHYEKLKGSPEDNEQKQLFVEQHKHYLDEIIEQISEFSKRVILADANLDKVLSAYNKHRDKPIREQAENIIHLFTLTNLGAPAAFKYFDTTIDRKRYTSTKEVLDATLIHQSITGLYETRIDLSQLGGDEGADKRTADGSEFESPKKKRKV

SEQ ID NO: 126 - protein, 1588 aa, Artificial Sequence
  Description of Artificial Sequence: Synthetic polypeptide
MSEVEFSHEYWMRHALTLAKRARDEREVPVGAVLVLNNRVIGEGWNRAIGLHDPTAHAEIMALRQGGLVMQNYRLIDATLYSTFEPCVMCAGAMIHSRIGRVVFGVRNAKTGAAGSLMDVLHYPGMNHRVEITEGILADECAALLCYFFRMPRRVFNAQKKAQSSTDSGGSSGGSSGSETPGTSESATPESSGGSSGGSDKKYSIGLAIGTNSVGWAVITDEYKVPSKKFKVLGNTDRHSIKKNLIGALLFDSGETAEATRLKRTARRRYTRRKNRICYLQEIFSNEMAKVDDSFFHRLEESFLVEEDKKHERHPIFGNIVDEVAYHEKYPTIYHLRKKLVDSTDKADLRLIYLALAHMIKFRGHFLIEGDLNPDNSDVDKLFIQLVQTYNQLFEENPINASGVDAKAILSARLSKSRRLENLIAQLPGEKKNGLFGNLIALSLGLTPNFKSNFDLAEDAKLQLSKDTYDDDLDNLLAQIGDQYADLFLAAKNLSDAILLSDILRVNTEITKAPLSASMIKRYDEHHQDLTLLKALVRQQLPEKYKEIFFDQSKNGYAGYIDGGASQEEFYKFIKPILEKMDGTEELLVKLNREDLLRKQRTFDNGSIPHQIHLGELHAILRRQEDFYPFLKDNREKIEKILTFRIPYYVGPLARGNSRFAWMTRKSEETITPWNFEEVVDKGASAQSFIERMTNFDKNLPNEKVLPKHSLLYEYFTVYNELTKVKYVTEGMRKPAFLSGEQKKAIVDLLFKTNRKVTVKQLKEDYFKKIECFDSVEISGVEDRFNASLGTYHDLLKIIKDKDFLDNEENEDILEDIVLTLTLFEDREMIEERLKTYAHLFDDKVMKQLKRRRYTGWGRLSRKLINGIRDKQSGKTILDFLKSDGFANRNFMQLIHDDSLTFKEDIQKAQVSGQGDSLHEHIANLAGSPAIKKGILQTVKVVDELVKVMGRHKPENIVIEMARENQTTQKGQKNSRERMKRIEEGIKELGSQILKEHPVENTQLQNEKLYLYYLQNGRDMYVDQELDINRLSDYDVDHIVPQSFLKDDSIDNKVLTRSDKNRGKSDNVPSEEVVKKMKNYWRQLLNAKLITQRKFDNLTKAERGGLSELDKAGFIKRQLVETRQITKHVAQILDSRMNTKYDENDKLIREVKVITLKSKLVSDFRKDFQFYKVREINNYHHAHDAYLNAVVGTALIKKYPKLESEFVYGDYKVYDVRKMIAKSEQEIGKATAKYFFYSNIMNFFKTEITLANGEIRKRPLIETNGETGEIVWDKGRDFATVRKVLSMPQVNIVKKTEVQTGGFSKESILPKRNSDKLIARKKDWDPKKYGGFDSPTVAYSVLVVAKVEKGKSKKLKSVKELLGITIMERSSFEKNPIDFLEAKGYKEVKKDLIIKLPKYSLFELENGRKRMLASAGELQKGNELALPSKYVNFLYLASHYEKLKGSPEDNEQKQLFVEQHKHYLDEIIEQISEFSKRVILADANLDKVLSAYNKHRDKPIREQAENIIHLFTLTNLGAPAAFKYFDTTIDRKRYTSTKEVLDATLIHQSITGLYETRIDLSQLGGDEGADKRTADGSEFESPKKKRKV

SEQ ID NO: 127 - protein, 1786 aa, Artificial Sequence
  Description of Artificial Sequence: Synthetic polypeptide
MSEVEFSHEYWMRHALTLAKRAWDEREVPVGAVLVHNNRVIGEGWNRPIGRHDPTAHAEIMALRQGGLVMQNYRLIDATLYVTLEPCVMCAGAMIHSRIGRVVFGARDAKTGAAGSLMDVLHHPGMNHRVEITEGILADECAALLSDFFRMRRQEIKAQKKAQSSTDSGGSSGGSSGSETPGTSESATPESSGGSSGGSSEVEFSHEYWMRHALTLAKRARDEREVPVGAVLVLNNRVIGEGWNRAIGLHDPTAHAEIMALRQGGLVMQNYRLIDATLYSTFEPCVMCAGAMIHSRIGRVVFGVRNAKTGAAGSLMDVLHYPGMNHRVEITEGILADECAALLCYFFRMPRRVFNAQKKAQSSTDSGGSSGGSSGSETPGTSESATPESSGGSSGGSDKKYSIGLAIGTNSVGWAVITDEYKVPSKKFKVLGNTDRHSIKKNLIGALLFDSGETAEATRLKRTARRRYTRRKNRICYLQEIFSNEMAKVDDSFFHRLEESFLVEEDKKHERHPIFGNIVDEVAYHEKYPTIYHLRKKLVDSTDKADLRLIYLALAHMIKFRGHFLIEGDLNPDNSDVDKLFIQLVQTYNQLFEENPINASGVDAKAILSARLSKSRRLENLIAQLPGEKKNGLFGNLIALSLGLTPNFKSNFDLAEDAKLQLSKDTYDDDLDNLLAQIGDQYADLFLAAKNLSDAILLSDILRVNTEITKAPLSASMIKRYDEHHQDLTLLKALVRQQLPEKYKEIFFDQSKNGYAGYIDGGASQEEFYKFIKPILEKMDGTEELLVKLNREDLLRKQRTFDNGSIPHQIHLGELHAILRRQEDFYPFLKDNREKIEKILTFRIPYYVGPLARGNSRFAWMTRKSEETITPWNFEEVVDKGASAQSFIERMTNFDKNLPNEKVLPKHSLLYEYFTVYNELTKVKYVTEGMRKPAFLSGEQKKAIVDLLFKTNRKVTVKQLKEDYFKKIECFDSVEISGVEDRFNASLGTYHDLLKIIKDKDFLDNEENEDILEDIVLTLTLFEDREMIEERLKTYAHLFDDKVMKQLKRRRYTGWGRLSRKLINGIRDKQSGKTILDFLKSDGFANRNFMQLIHDDSLTFKEDIQKAQVSGQGDSLHEHIANLAGSPAIKKGILQTVKVVDELVKVMGRHKPENIVIEMARENQTTQKGQKNSRERMKRIEEGIKELGSQILKEHPVENTQLQNEKLYLYYLQNGRDMYVDQELDINRLSDYDVDHIVPQSFLKDDSIDNKVLTRSDKNRGKSDNVPSEEVVKKMKNYWRQLLNAKLITQRKFDNLTKAERGGLSELDKAGFIKRQLVETRQITKHVAQILDSRMNTKYDENDKLIREVKVITLKSKLVSDFRKDFQFYKVREINNYHHAHDAYLNAVVGTALIKKYPKLESEFVYGDYKVYDVRKMIAKSEQEIGKATAKYFFYSNIMNFFKTEITLANGEIRKRPLIETNGETGEIVWDKGRDFATVRKVLSMPQVNIVKKTEVQTGGFSKESILPKRNSDKLIARKKDWDPKKYGGFDSPTVAYSVLVVAKVEKGKSKKLKSVKELLGITIMERSSFEKNPIDFLEAKGYKEVKKDLIIKLPKYSLFELENGRKRMLASAGELQKGNELALPSKYVNFLYLASHYEKLKGSPEDNEQKQLFVEQHKHYLDEIIEQISEFSKRVILADANLDKVLSAYNKHRDKPIREQAENIIHLFTLTNLGAPAAFKYFDTTIDRKRYTSTKEVLDATLIHQSITGLYETRIDLSQLGGDEGADKRTADGSEFESPKKKRKV

SEQ ID NO: 128 - protein, 1588 aa, Artificial Sequence
  Description of Artificial Sequence: Synthetic polypeptide
MSEVEFSHEYWMRHALTLAKRARDEREVPVGAVLVLNNRVIGEGWNRAIGLHDPTAHAEIMALRQGGLVMQNYRLYDATLYSTFEPCVMCAGAMIHSRIGRVVFGVRNAKTGAAGSLMDVLHHPGMNHRVEITEGILADECAALLCRFFRMPRRVFNAQKKAQSSTDSGGSSGGSSGSETPGTSESATPESSGGSSGGSDKKYSIGLAIGTNSVGWAVITDEYKVPSKKFKVLGNTDRHSIKKNLIGALLFDSGETAEATRLKRTARRRYTRRKNRICYLQEIFSNEMAKVDDSFFHRLEESFLVEEDKKHERHPIFGNIVDEVAYHEKYPTIYHLRKKLVDSTDKADLRLIYLALAHMIKFRGHFLIEGDLNPDNSDVDKLFIQLVQTYNQLFEENPINASGVDAKAILSARLSKSRRLENLIAQLPGEKKNGLFGNLIALSLGLTPNFKSNFDLAEDAKLQLSKDTYDDDLDNLLAQIGDQYADLFLAAKNLSDAILLSDILRVNTEITKAPLSASMIKRYDEHHQDLTLLKALVRQQLPEKYKEIFFDQSKNGYAGYIDGGASQEEFYKFIKPILEKMDGTEELLVKLNREDLLRKQRTFDNGSIPHQIHLGELHAILRRQEDFYPFLKDNREKIEKILTFRIPYYVGPLARGNSRFAWMTRKSEETITPWNFEEVVDKGASAQSFIERMTNFDKNLPNEKVLPKHSLLYEYFTVYNELTKVKYVTEGMRKPAFLSGEQKKAIVDLLFKTNRKVTVKQLKEDYFKKIECFDSVEISGVEDRFNASLGTYHDLLKIIKDKDFLDNEENEDILEDIVLTLTLFEDREMIEERLKTYAHLFDDKVMKQLKRRRYTGWGRLSRKLINGIRDKQSGKTILDFLKSDGFANRNFMQLIHDDSLTFKEDIQKAQVSGQGDSLHEHIANLAGSPAIKKGILQTVKVVDELVKVMGRHKPENIVIEMARENQTTQKGQKNSRERMKRIEEGIKELGSQILKEHPVENTQLQNEKLYLYYLQNGRDMYVDQELDINRLSDYDVDHIVPQSFLKDDSIDNKVLTRSDKNRGKSDNVPSEEVVKKMKNYWRQLLNAKLITQRKFDNLTKAERGGLSELDKAGFIKRQLVETRQITKHVAQILDSRMNTKYDENDKLIREVKVITLKSKLVSDFRKDFQFYKVREINNYHHAHDAYLNAVVGTALIKKYPKLESEFVYGDYKVYDVRKMIAKSEQEIGKATAKYFFYSNIMNFFKTEITLANGEIRKRPLIETNGETGEIVWDKGRDFATVRKVLSMPQVNIVKKTEVQTGGFSKESILPKRNSDKLIARKKDWDPKKYGGFDSPTVAYSVLVVAKVEKGKSKKLKSVKELLGITIMERSSFEKNPIDFLEAKGYKEVKKDLIIKLPKYSLFELENGRKRMLASAGELQKGNELALPSKYVNFLYLASHYEKLKGSPEDNEQKQLFVEQHKHYLDEIIEQISEFSKRVILADANLDKVLSAYNKHRDKPIREQAENIIHLFTLTNLGAPAAFKYFDTTIDRKRYTSTKEVLDATLIHQSITGLYETRIDLSQLGGDEGADKRTADGSEFESPKKKRKV

SEQ ID NO: 129 - protein, 1786 aa, Artificial Sequence
  Description of Artificial Sequence: Synthetic polypeptide
MSEVEFSHEYWMRHALTLAKRAWDEREVPVGAVLVHNNRVIGEGWNRPIGRHDPTAHAEIMALRQGGLVMQNYRLIDATLYVTLEPCVMCAGAMIHSRIGRVVFGARDAKTGAAGSLMDVLHHPGMNHRVEITEGILADECAALLSDFFRMRRQEIKAQKKAQSSTDSGGSSGGSSGSETPGTSESATPESSGGSSGGSSEVEFSHEYWMRHALTLAKRARDEREVPVGAVLVLNNRVIGEGWNRAIGLHDPTAHAEIMALRQGGLVMQNYRLYDATLYSTFEPCVMCAGAMIHSRIGRVVFGVRNAKTGAAGSLMDVLHHPGMNHRVEITEGILADECAALLCRFFRMPRRVFNAQKKAQSSTDSGGSSGGSSGSETPGTSESATPESSGGSSGGSDKKYSIGLAIGTNSVGWAVITDEYKVPSKKFKVLGNTDRHSIKKNLIGALLFDSGETAEATRLKRTARRRYTRRKNRICYLQEIFSNEMAKVDDSFFHRLEESFLVEEDKKHERHPIFGNIVDEVAYHEKYPTIYHLRKKLVDSTDKADLRLIYLALAHMIKFRGHFLIEGDLNPDNSDVDKLFIQLVQTYNQLFEENPINASGVDAKAILSARLSKSRRLENLIAQLPGEKKNGLFGNLIALSLGLTPNFKSNFDLAEDAKLQLSKDTYDDDLDNLLAQIGDQYADLFLAAKNLSDAILLSDILRVNTEITKAPLSASMIKRYDEHHQDLTLLKALVRQQLPEKYKEIFFDQSKNGYAGYIDGGASQEEFYKFIKPILEKMDGTEELLVKLNREDLLRKQRTFDNGSIPHQIHLGELHAILRRQEDFYPFLKDNREKIEKILTFRIPYYVGPLARGNSRFAWMTRKSEETITPWNFEEVVDKGASAQSFIERMTNFDKNLPNEKVLPKHSLLYEYFTVYNELTKVKYVTEGMRKPAFLSGEQKKAIVDLLFKTNRKVTVKQLKEDYFKKIECFDSVEISGVEDRFNASLGTYHDLLKIIKDKDFLDNEENEDILEDIVLTLTLFEDREMIEERLKTYAHLFDDKVMKQLKRRRYTGWGRLSRKLINGIRDKQSGKTILDFLKSDGFANRNFMQLIHDDSLTFKEDIQKAQVSGQGDSLHEHIANLAGSPAIKKGILQTVKVVDELVKVMGRHKPENIVIEMARENQTTQKGQKNSRERMKRIEEGIKELGSQILKEHPVENTQLQNEKLYLYYLQNGRDMYVDQELDINRLSDYDVDHIVPQSFLKDDSIDNKVLTRSDKNRGKSDNVPSEEVVKKMKNYWRQLLNAKLITQRKFDNLTKAERGGLSELDKAGFIKRQLVETRQITKHVAQILDSRMNTKYDENDKLIREVKVITLKSKLVSDFRKDFQFYKVREINNYHHAHDAYLNAVVGTALIKKYPKLESEFVYGDYKVYDVRKMIAKSEQEIGKATAKYFFYSNIMNFFKTEITLANGEIRKRPLIETNGETGEIVWDKGRDFATVRKVLSMPQVNIVKKTEVQTGGFSKESILPKRNSDKLIARKKDWDPKKYGGFDSPTVAYSVLVVAKVEKGKSKKLKSVKELLGITIMERSSFEKNPIDFLEAKGYKEVKKDLIIKLPKYSLFELENGRKRMLASAGELQKGNELALPSKYVNFLYLASHYEKLKGSPEDNEQKQLFVEQHKHYLDEIIEQISEFSKRVILADANLDKVLSAYNKHRDKPIREQAENIIHLFTLTNLGAPAAFKYFDTTIDRKRYTSTKEVLDATLIHQSITGLYETRIDLSQLGGDEGADKRTADGSEFESPKKKRKV

SEQ ID NO: 130 - protein, 1588 aa, Artificial Sequence
  Description of Artificial Sequence: Synthetic polypeptide
MSEVEFSHEYWMRHALTLAKRARDEREVPVGAVLVLNNRVIGEGWNRAIGLHDPTAHAEIMALRQGGLVMQNYRLIDATLYVTFEPCVMCAGAMIHSRIGRVVFGVRNAKTGAAGSLMDVLHYPGMNHRVEITEGILADECAALLCTFFRMPRQVFNAQKKAQSSTDSGGSSGGSSGSETPGTSESATPESSGGSSGGSDKKYSIGLAIGTNSVGWAVITDEYKVPSKKFKVLGNTDRHSIKKNLIGALLFDSGETAEATRLKRTARRRYTRRKNRICYLQEIFSNEMAKVDDSFFHRLEESFLVEEDKKHERHPIFGNIVDEVAYHEKYPTIYHLRKKLVDSTDKADLRLIYLALAHMIKFRGHFLIEGDLNPDNSDVDKLFIQLVQTYNQLFEENPINASGVDAKAILSARLSKSRRLENLIAQLPGEKKNGLFGNLIALSLGLTPNFKSNFDLAEDAKLQLSKDTYDDDLDNLLAQIGDQYADLFLAAKNLSDAILLSDILRVNTEITKAPLSASMIKRYDEHHQDLTLLKALVRQQLPEKYKEIFFDQSKNGYAGYIDGGASQEEFYKFIKPILEKMDGTEELLVKLNREDLLRKQRTFDNGSIPHQIHLGELHAILRRQEDFYPFLKDNREKIEKILTFRIPYYVGPLARGNSRFAWMTRKSEETITPWNFEEVVDKGASAQSFIERMTNFDKNLPNEKVLPKHSLLYEYFTVYNELTKVKYVTEGMRKPAFLSGEQKKAIVDLLFKTNRKVTVKQLKEDYFKKIECFDSVEISGVEDRFNASLGTYHDLLKIIKDKDFLDNEENEDILEDIVLTLTLFEDREMIEERLKTYAHLFDDKVMKQLKRRRYTGWGRLSRKLINGIRDKQSGKTILDFLKSDGFANRNFMQLIHDDSLTFKEDIQKAQVSGQGDSLHEHIANLAGSPAIKKGILQTVKVVDELVKVMGRHKPENIVIEMARENQTTQKGQKNSRERMKRIEEGIKELGSQILKEHPVENTQLQNEKLYLYYLQNGRDMYVDQELDINRLSDYDVDHIVPQSFLKDDSIDNKVLTRSDKNRGKSDNVPSEEVVKKMKNYWRQLLNAKLITQRKFDNLTKAERGGLSELDKAGFIKRQLVETRQITKHVAQILDSRMNTKYDENDKLIREVKVITLKSKLVSDFRKDFQFYKVREINNYHHAHDAYLNAVVGTALIKKYPKLESEFVYGDYKVYDVRKMIAKSEQEIGKATAKYFFYSNIMNFFKTEITLANGEIRKRPLIETNGETGEIVWDKGRDFATVRKVLSMPQVNIVKKTEVQTGGFSKESILPKRNSDKLIARKKDWDPKKYGGFVSPTVAYSVLVVAKVEKGKSKKLKSVKELLGITIMERSSFEKNPIDFLEAKGYKEVKKDLIIKLPKYSLFELENGRKRMLASARELQKGNELALPSKYVNFLYLASHYEKLKGSPEDNEQKQLFVEQHKHYLDEIIEQISEFSKRVILADANLDKVLSAYNKHRDKPIREQAENIIHLFTLTNLGAPAAFKYFDTTIDRKQYRSTKEVLDATLIHQSITGLYETRIDLSQLGGDEGADKRTADGSEFESPKKKRKV

SEQ ID NO: 131 - protein, 1588 aa, Artificial Sequence
  Description of Artificial Sequence: Synthetic polypeptide
MSEVEFSHEYWMRHALTLAKRARDEREVPVGAVLVLNNRVIGEGWNRAIGLHDPTAHAEIMALRQGGLVMQNYRLIDATLYVTFEPCVMCAGAMIHSRIGRVVFGVRNAKTGAAGSLMDVLHYPGMNHRVEITEGILADECAALLCRFFRMPRQVFNAQKKAQSSTDSGGSSGGSSGSETPGTSESATPESSGGSSGGSDKKYSIGLAIGTNSVGWAVITDEYKVPSKKFKVLGNTDRHSIKKNLIGALLFDSGETAEATRLKRTARRRYTRRKNRICYLQEIFSNEMAKVDDSFFHRLEESFLVEEDKKHERHPIFGNIVDEVAYHEKYPTIYHLRKKLVDSTDKADLRLIYLALAHMIKFRGHFLIEGDLNPDNSDVDKLFIQLVQTYNQLFEENPINASGVDAKAILSARLSKSRRLENLIAQLPGEKKNGLFGNLIALSLGLTPNFKSNFDLAEDAKLQLSKDTYDDDLDNLLAQIGDQYADLFLAAKNLSDAILLSDILRVNTEITKAPLSASMIKRYDEHHQDLTLLKALVRQQLPEKYKEIFFDQSKNGYAGYIDGGASQEEFYKFIKPILEKMDGTEELLVKLNREDLLRKQRTFDNGSIPHQIHLGELHAILRRQEDFYPFLKDNREKIEKILTFRIPYYVGPLARGNSRFAWMTRKSEETITPWNFEEVVDKGASAQSFIERMTNFDKNLPNEKVLPKHSLLYEYFTVYNELTKVKYVTEGMRKPAFLSGEQKKAIVDLLFKTNRKVTVKQLKEDYFKKIECFDSVEISGVEDRFNASLGTYHDLLKIIKDKDFLDNEENEDILEDIVLTLTLFEDREMIEERLKTYAHLFDDKVMKQLKRRRYTGWGRLSRKLINGIRDKQSGKTILDFLKSDGFANRNFMQLIHDDSLTFKEDIQKAQVSGQGDSLHEHIANLAGSPAIKKGILQTVKVVDELVKVMGRHKPENIVIEMARENQTTQKGQKNSRERMKRIEEGIKELGSQILKEHPVENTQLQNEKLYLYYLQNGRDMYVDQELDINRLSDYDVDHIVPQSFLKDDSIDNKVLTRSDKNRGKSDNVPSEEVVKKMKNYWRQLLNAKLITQRKFDNLTKAERGGLSELDKAGFIKRQLVETRQITKHVAQILDSRMNTKYDENDKLIREVKVITLKSKLVSDFRKDFQFYKVREINNYHHAHDAYLNAVVGTALIKKYPKLESEFVYGDYKVYDVRKMIAKSEQEIGKATAKYFFYSNIMNFFKTEITLANGEIRKRPLIETNGETGEIVWDKGRDFATVRKVLSMPQVNIVKKTEVQTGGFSKESILPKRNSDKLIARKKDWDPKKYGGFVSPTVAYSVLVVAKVEKGKSKKLKSVKELLGITIMERSSFEKNPIDFLEAKGYKEVKKDLIIKLPKYSLFELENGRKRMLASARELQKGNELALPSKYVNFLYLASHYEKLKGSPEDNEQKQLFVEQHKHYLDEIIEQISEFSKRVILADANLDKVLSAYNKHRDKPIREQAENIIHLFTLTNLGAPAAFKYFDTTIDRKQYRSTKEVLDATLIHQSITGLYETRIDLSQLGGDEGADKRTADGSEFESPKKKRKV

SEQ ID NO: 132 - protein, 1588 aa, Artificial Sequence
  Description of Artificial Sequence: Synthetic polypeptide
MSEVEFSHEYWMRHALTLAKRARDEREVPVGAVLVLNNRVIGEGWNRAIGLHDPTAHAEIMALRQGGLVMQNYRLIDATLYVTFEPCVMCAGAMIHSRIGRVVFGVRNAKTGAAGSLMDVLHYPGMNHRVEITEGILADECAALLCYFFRMPRSVFNAQKKAQSSTDSGGSSGGSSGSETPGTSESATPESSGGSSGGSDKKYSIGLAIGTNSVGWAVITDEYKVPSKKFKVLGNTDRHSIKKNLIGALLFDSGETAEATRLKRTARRRYTRRKNRICYLQEIFSNEMAKVDDSFFHRLEESFLVEEDKKHERHPIFGNIVDEVAYHEKYPTIYHLRKKLVDSTDKADLRLIYLALAHMIKFRGHFLIEGDLNPDNSDVDKLFIQLVQTYNQLFEENPINASGVDAKAILSARLSKSRRLENLIAQLPGEKKNGLFGNLIALSLGLTPNFKSNFDLAEDAKLQLSKDTYDDDLDNLLAQIGDQYADLFLAAKNLSDAILLSDILRVNTEITKAPLSASMIKRYDEHHQDLTLLKALVRQQLPEKYKEIFFDQSKNGYAGYIDGGASQEEFYKFIKPILEKMDGTEELLVKLNREDLLRKQRTFDNGSIPHQIHLGELHAILRRQEDFYPFLKDNREKIEKILTFRIPYYVGPLARGNSRFAWMTRKSEETITPWNFEEVVDKGASAQSFIERMTNFDKNLPNEKVLPKHSLLYEYFTVYNELTKVKYVTEGMRKPAFLSGEQKKAIVDLLFKTNRKVTVKQLKEDYFKKIECFDSVEISGVEDRFNASLGTYHDLLKIIKDKDFLDNEENEDILEDIVLTLTLFEDREMIEERLKTYAHLFDDKVMKQLKRRRYTGWGRLSRKLINGIRDKQSGKTILDFLKSDGFANRNFMQLIHDDSLTFKEDIQKAQVSGQGDSLHEHIANLAGSPAIKKGILQTVKVVDELVKVMGRHKPENIVIEMARENQTTQKGQKNSRERMKRIEEGIKELGSQILKEHPVENTQLQNEKLYLYYLQNGRDMYVDQELDINRLSDYDVDHIVPQSFLKDDSIDNKVLTRSDKNRGKSDNVPSEEVVKKMKNYWRQLLNAKLITQRKFDNLTKAERGGLSELDKAGFIKRQLVETRQITKHVAQILDSRMNTKYDENDKLIREVKVITLKSKLVSDFRKDFQFYKVREINNYHHAHDAYLNAVVGTALIKKYPKLESEFVYGDYKVYDVRKMIAKSEQEIGKATAKYFFYSNIMNFFKTEITLANGEIRKRPLIETNGETGEIVWDKGRDFATVRKVLSMPQVNIVKKTEVQTGGFSKESILPKRNSDKLIARKKDWDPKKYGGFVSPTVAYSVLVVAKVEKGKSKKLKSVKELLGITIMERSSFEKNPIDFLEAKGYKEVKKDLIIKLPKYSLFELENGRKRMLASARELQKGNELALPSKYVNFLYLASHYEKLKGSPEDNEQKQLFVEQHKHYLDEIIEQISEFSKRVILADANLDKVLSAYNKHRDKPIREQAENIIHLFTLTNLGAPAAFKYFDTTIDRKQYRSTKEVLDATLIHQSITGLYETRIDLSQLGGDEGADKRTADGSEFESPKKKRKV

SEQ ID NO: 133 - protein, 1588 aa, Artificial Sequence
  Description of Artificial Sequence: Synthetic polypeptide
MSEVEFSHEYWMRHALTLAKRARDEREVPVGAVLVLNNRVIGEGWNRAIGLHDPTAHAEIMALRQGGLVMQNYRLIDATLYVTFEPCVMCAGAMIHSRIGRVVFGVRNAKTGAAGSLMDVLHHPGMNHRVEITEGILADECAALLCYFFRMPRQVFNAQKKAQSSTDSGGSSGGSSGSETPGTSESATPESSGGSSGGSDKKYSIGLAIGTNSVGWAVITDEYKVPSKKFKVLGNTDRHSIKKNLIGALLFDSGETAEATRLKRTARRRYTRRKNRICYLQEIFSNEMAKVDDSFFHRLEESFLVEEDKKHERHPIFGNIVDEVAYHEKYPTIYHLRKKLVDSTDKADLRLIYLALAHMIKFRGHFLIEGDLNPDNSDVDKLFIQLVQTYNQLFEENPINASGVDAKAILSARLSKSRRLENLIAQLPGEKKNGLFGNLIALSLGLTPNFKSNFDLAEDAKLQLSKDTYDDDLDNLLAQIGDQYADLFLAAKNLSDAILLSDILRVNTEITKAPLSASMIKRYDEHHQDLTLLKALVRQQLPEKYKEIFFDQSKNGYAGYIDGGASQEEFYKFIKPILEKMDGTEELLVKLNREDLLRKQRTFDNGSIPHQIHLGELHAILRRQEDFYPFLKDNREKIEKILTFRIPYYVGPLARGNSRFAWMTRKSEETITPWNFEEVVDKGASAQSFIERMTNFDKNLPNEKVLPKHSLLYEYFTVYNELTKVKYVTEGMRKPAFLSGEQKKAIVDLLFKTNRKVTVKQLKEDYFKKIECFDSVEISGVEDRFNASLGTYHDLLKIIKDKDFLDNEENEDILEDIVLTLTLFEDREMIEERLKTYAHLFDDKVMKQLKRRRYTGWGRLSRKLINGIRDKQSGKTILDFLKSDGFANRNFMQLIHDDSLTFKEDIQKAQVSGQGDSLHEHIANLAGSPAIKKGILQTVKVVDELVKVMGRHKPENIVIEMARENQTTQKGQKNSRERMKRIEEGIKELGSQILKEHPVENTQLQNEKLYLYYLQNGRDMYVDQELDINRLSDYDVDHIVPQSFLKDDSIDNKVLTRSDKNRGKSDNVPSEEVVKKMKNYWRQLLNAKLITQRKFDNLTKAERGGLSELDKAGFIKRQLVETRQITKHVAQILDSRMNTKYDENDKLIREVKVITLKSKLVSDFRKDFQFYKVREINNYHHAHDAYLNAVVGTALIKKYPKLESEFVYGDYKVYDVRKMIAKSEQEIGKATAKYFFYSNIMNFFKTEITLANGEIRKRPLIETNGETGEIVWDKGRDFATVRKVLSMPQVNIVKKTEVQTGGFSKESILPKRNSDKLIARKKDWDPKKYGGFVSPTVAYSVLVVAKVEKGKSKKLKSVKELLGITIMERSSFEKNPIDFLEAKGYKEVKKDLIIKLPKYSLFELENGRKRMLASARELQKGNELALPSKYVNFLYLASHYEKLKGSPEDNEQKQLFVEQHKHYLDEIIEQISEFSKRVILADANLDKVLSAYNKHRDKPIREQAENIIHLFTLTNLGAPAAFKYFDTTIDRKQYRSTKEVLDATLIHQSITGLYETRIDLSQLGGDEGADKRTADGSEFESPKKKRKV

SEQ ID NO: 134 - protein, 1588 aa, Artificial Sequence
  Description of Artificial Sequence: Synthetic polypeptide
MSEVEFSHEYWMRHALTLAKRARDEREVPVGAVLVLNNRVIGEGWNRAIGLHDPTAHAEIMALRQGGLVMQNYRLIDATLYSTFEPCVMCAGAMIHSRIGRVVFGVRNAKTGAAGSLMDVLHYPGMNHRVEITEGILADECAALLCYFFRMPRQVFNAQKKAQSSTDSGGSSGGSSGSETPGTSESATPESSGGSSGGSDKKYSIGLAIGTNSVGWAVITDEYKVPSKKFKVLGNTDRHSIKKNLIGALLFDSGETAEATRLKRTARRRYTRRKNRICYLQEIFSNEMAKVDDSFFHRLEESFLVEEDKKHERHPIFGNIVDEVAYHEKYPTIYHLRKKLVDSTDKADLRLIYLALAHMIKFRGHFLIEGDLNPDNSDVDKLFIQLVQTYNQLFEENPINASGVDAKAILSARLSKSRRLENLIAQLPGEKKNGLFGNLIALSLGLTPNFKSNFDLAEDAKLQLSKDTYDDDLDNLLAQIGDQYADLFLAAKNLSDAILLSDILRVNTEITKAPLSASMIKRYDEHHQDLTLLKALVRQQLPEKYKEIFFDQSKNGYAGYIDGGASQEEFYKFIKPILEKMDGTEELLVKLNREDLLRKQRTFDNGSIPHQIHLGELHAILRRQEDFYPFLKDNREKIEKILTFRIPYYVGPLARGNSRFAWMTRKSEETITPWNFEEVVDKGASAQSFIERMTNFDKNLPNEKVLPKHSLLYEYFTVYNELTKVKYVTEGMRKPAFLSGEQKKAIVDLLFKTNRKVTVKQLKEDYFKKIECFDSVEISGVEDRFNASLGTYHDLLKIIKDKDFLDNEENEDILEDIVLTLTLFEDREMIEERLKTYAHLFDDKVMKQLKRRRYTGWGRLSRKLINGIRDKQSGKTILDFLKSDGFANRNFMQLIHDDSLTFKEDIQKAQVSGQGDSLHEHIANLAGSPAIKKGILQTVKVVDELVKVMGRHKPENIVIEMARENQTTQKGQKNSRERMKRIEEGIKELGSQILKEHPVENTQLQNEKLYLYYLQNGRDMYVDQELDINRLSDYDVDHIVPQSFLKDDSIDNKVLTRSDKNRGKSDNVPSEEVVKKMKNYWRQLLNAKLITQRKFDNLTKAERGGLSELDKAGFIKRQLVETRQITKHVAQILDSRMNTKYDENDKLIREVKVITLKSKLVSDFRKDFQFYKVREINNYHHAHDAYLNAVVGTALIKKYPKLESEFVYGDYKVYDVRKMIAKSEQEIGKATAKYFFYSNIMNFFKTEITLANGEIRKRPLIETNGETGEIVWDKGRDFATVRKVLSMPQVNIVKKTEVQTGGFSKESILPKRNSDKLIARKKDWDPKKYGGFVSPTVAYSVLVVAKVEKGKSKKLKSVKELLGITIMERSSFEKNPIDFLEAKGYKEVKKDLIIKLPKYSLFELENGRKRMLASARELQKGNELALPSKYVNFLYLASHYEKLKGSPEDNEQKQLFVEQHKHYLDEIIEQISEFSKRVILADANLDKVLSAYNKHRDKPIREQAENIIHLFTLTNLGAPAAFKYFDTTIDRKQYRSTKEVLDATLIHQSITGLYETRIDLSQLGGDEGADKRTADGSEFESPKKKRKV

SEQ ID NO: 135 - protein, 1588 aa, Artificial Sequence
  Description of Artificial Sequence: Synthetic polypeptide
MSEVEFSHEYWMRHALTLAKRARDEREVPVGAVLVLNNRVIGEGWNRAIGLHDPTAHAEIMALRQGGLVMQNYRLIDATLYVTFEPCVMCAGAMIHSRIGRVVFGVRNAKTGAAGSLMDVLHYPGMNHRVEITEGILADECAALLCYFFRMPRQVFNAQKKAQSSRDSGGSSGGSSGSETPGTSESATPESSGGSSGGSDKKYSIGLAIGTNSVGWAVITDEYKVPSKKFKVLGNTDRHSIKKNLIGALLFDSGETAEATRLKRTARRRYTRRKNRICYLQEIFSNEMAKVDDSFFHRLEESFLVEEDKKHERHPIFGNIVDEVAYHEKYPTIYHLRKKLVDSTDKADLRLIYLALAHMIKFRGHFLIEGDLNPDNSDVDKLFIQLVQTYNQLFEENPINASGVDAKAILSARLSKSRRLENLIAQLPGEKKNGLFGNLIALSLGLTPNFKSNFDLAEDAKLQLSKDTYDDDLDNLLAQIGDQYADLFLAAKNLSDAILLSDILRVNTEITKAPLSASMIKRYDEHHQDLTLLKALVRQQLPEKYKEIFFDQSKNGYAGYIDGGASQEEFYKFIKPILEKMDGTEELLVKLNREDLLRKQRTFDNGSIPHQIHLGELHAILRRQEDFYPFLKDNREKIEKILTFRIPYYVGPLARGNSRFAWMTRKSEETITPWNFEEVVDKGASAQSFIERMTNFDKNLPNEKVLPKHSLLYEYFTVYNELTKVKYVTEGMRKPAFLSGEQKKAIVDLLFKTNRKVTVKQLKEDYFKKIECFDSVEISGVEDRFNASLGTYHDLLKIIKDKDFLDNEENEDILEDIVLTLTLFEDREMIEERLKTYAHLFDDKVMKQLKRRRYTGWGRLSRKLINGIRDKQSGKTILDFLKSDGFANRNFMQLIHDDSLTFKEDIQKAQVSGQGDSLHEHIANLAGSPAIKKGILQTVKVVDELVKVMGRHKPENIVIEMARENQTTQKGQKNSRERMKRIEEGIKELGSQILKEHPVENTQLQNEKLYLYYLQNGRDMYVDQELDINRLSDYDVDHIVPQSFLKDDSIDNKVLTRSDKNRGKSDNVPSEEVVKKMKNYWRQLLNAKLITQRKFDNLTKAERGGLSELDKAGFIKRQLVETRQITKHVAQILDSRMNTKYDENDKLIREVKVITLKSKLVSDFRKDFQFYKVREINNYHHAHDAYLNAVVGTALIKKYPKLESEFVYGDYKVYDVRKMIAKSEQEIGKATAKYFFYSNIMNFFKTEITLANGEIRKRPLIETNGETGEIVWDKGRDFATVRKVLSMPQVNIVKKTEVQTGGFSKESILPKRNSDKLIARKKDWDPKKYGGFVSPTVAYSVLVVAKVEKGKSKKLKSVKELLGITIMERSSFEKNPIDFLEAKGYKEVKKDLIIKLPKYSLFELENGRKRMLASARELQKGNELALPSKYVNFLYLASHYEKLKGSPEDNEQKQLFVEQHKHYLDEIIEQISEFSKRVILADANLDKVLSAYNKHRDKPIREQAENIIHLFTLTNLGAPAAFKYFDTTIDRKQYRSTKEVLDATLIHQSITGLYETRIDLSQLGGDEGADKRTADGSEFESPKKKRKV

SEQ ID NO: 136 - protein, 1588 aa, Artificial Sequence
  Description of Artificial Sequence: Synthetic polypeptide
MSEVEFSHEYWMRHALTLAKRARDEREVPVGAVLVLNNRVIGEGWNRAIGLHDPTAHAEIMALRQGGLVMQNYRLIDATLYVTFEPCVMCAGAMIHSRIGRVVFGVRNAKTGAAGSLMDVLHYPGMNHRVEITEGILADECAALLCYFFRMPRRVFNAQKKAQSSTDSGGSSGGSSGSETPGTSESATPESSGGSSGGSDKKYSIGLAIGTNSVGWAVITDEYKVPSKKFKVLGNTDRHSIKKNLIGALLFDSGETAEATRLKRTARRRYTRRKNRICYLQEIFSNEMAKVDDSFFHRLEESFLVEEDKKHERHPIFGNIVDEVAYHEKYPTIYHLRKKLVDSTDKADLRLIYLALAHMIKFRGHFLIEGDLNPDNSDVDKLFIQLVQTYNQLFEENPINASGVDAKAILSARLSKSRRLENLIAQLPGEKKNGLFGNLIALSLGLTPNFKSNFDLAEDAKLQLSKDTYDDDLDNLLAQIGDQYADLFLAAKNLSDAILLSDILRVNTEITKAPLSASMIKRYDEHHQDLTLLKALVRQQLPEKYKEIFFDQSKNGYAGYIDGGASQEEFYKFIKPILEKMDGTEELLVKLNREDLLRKQRTFDNGSIPHQIHLGELHAILRRQEDFYPFLKDNREKIEKILTFRIPYYVGPLARGNSRFAWMTRKSEETITPWNFEEVVDKGASAQSFIERMTNFDKNLPNEKVLPKHSLLYEYFTVYNELTKVKYVTEGMRKPAFLSGEQKKAIVDLLFKTNRKVTVKQLKEDYFKKIECFDSVEISGVEDRFNASLGTYHDLLKIIKDKDFLDNEENEDILEDIVLTLTLFEDREMIEERLKTYAHLFDDKVMKQLKRRRYTGWGRLSRKLINGIRDKQSGKTILDFLKSDGFANRNFMQLIHDDSLTFKEDIQKAQVSGQGDSLHEHIANLAGSPAIKKGILQTVKVVDELVKVMGRHKPENIVIEMARENQTTQKGQKNSRERMKRIEEGIKELGSQILKEHPVENTQLQNEKLYLYYLQNGRDMYVDQELDINRLSDYDVDHIVPQSFLKDDSIDNKVLTRSDKNRGKSDNVPSEEVVKKMKNYWRQLLNAKLITQRKFDNLTKAERGGLSELDKAGFIKRQLVETRQITKHVAQILDSRMNTKYDENDKLIREVKVITLKSKLVSDFRKDFQFYKVREINNYHHAHDAYLNAVVGTALIKKYPKLESEFVYGDYKVYDVRKMIAKSEQEIGKATAKYFFYSNIMNFFKTEITLANGEIRKRPLIETNGETGEIVWDKGRDFATVRKVLSMPQVNIVKKTEVQTGGFSKESILPKRNSDKLIARKKDWDPKKYGGFVSPTVAYSVLVVAKVEKGKSKKLKSVKELLGITIMERSSFEKNPIDFLEAKGYKEVKKDLIIKLPKYSLFELENGRKRMLASARELQKGNELALPSKYVNFLYLASHYEKLKGSPEDNEQKQLFVEQHKHYLDEIIEQISEFSKRVILADANLDKVLSAYNKHRDKPIREQAENIIHLFTLTNLGAPAAFKYFDTTIDRKQYRSTKEVLDATLIHQSITGLYETRIDLSQLGGDEGADKRTADGSEFESPKKKRKV

SEQ ID NO: 137 - protein, 1588 aa, Artificial Sequence
  Description of Artificial Sequence: Synthetic polypeptide
MSEVEFSHEYWMRHALTLAKRARDEREVPVGAVLVLNNRVIGEGWNRAIGLHDPTAHAEIMALRQGGLVMQNYRLIDATLYVTFEPCVMCAGAMIHSRIGRVVFGVRNAKTGAAGSLMDVLHHPGMNHRVEITEGILADECAALLCRFFRMPRRVFNAQKKAQSSTDSGGSSGGSSGSETPGTSESATPESSGGSSGGSDKKYSIGLAIGTNSVGWAVITDEYKVPSKKFKVLGNTDRHSIKKNLIGALLFDSGETAEATRLKRTARRRYTRRKNRICYLQEIFSNEMAKVDDSFFHRLEESFLVEEDKKHERHPIFGNIVDEVAYHEKYPTIYHLRKKLVDSTDKADLRLIYLALAHMIKFRGHFLIEGDLNPDNSDVDKLFIQLVQTYNQLFEENPINASGVDAKAILSARLSKSRRLENLIAQLPGEKKNGLFGNLIALSLGLTPNFKSNFDLAEDAKLQLSKDTYDDDLDNLLAQIGDQYADLFLAAKNLSDAILLSDILRVNTEITKAPLSASMIKRYDEHHQDLTLLKALVRQQLPEKYKEIFFDQSKNGYAGYIDGGASQEEFYKFIKPILEKMDGTEELLVKLNREDLLRKQRTFDNGSIPHQIHLGELHAILRRQEDFYPFLKDNREKIEKILTFRIPYYVGPLARGNSRFAWMTRKSEETITPWNFEEVVDKGASAQSFIERMTNFDKNLPNEKVLPKHSLLYEYFTVYNELTKVKYVTEGMRKPAFLSGEQKKAIVDLLFKTNRKVTVKQLKEDYFKKIECFDSVEISGVEDRFNASLGTYHDLLKIIKDKDFLDNEENEDILEDIVLTLTLFEDREMIEERLKTYAHLFDDKVMKQLKRRRYTGWGRLSRKLINGIRDKQSGKTILDFLKSDGFANRNFMQLIHDDSLTFKEDIQKAQVSGQGDSLHEHIANLAGSPAIKKGILQTVKVVDELVKVMGRHKPENIVIEMARENQTTQKGQKNSRERMKRIEEGIKELGSQILKEHPVENTQLQNEKLYLYYLQNGRDMYVDQELDINRLSDYDVDHIVPQSFLKDDSIDNKVLTRSDKNRGKSDNVPSEEVVKKMKNYWRQLLNAKLITQRKFDNLTKAERGGLSELDKAGFIKRQLVETRQITKHVAQILDSRMNTKYDENDKLIREVKVITLKSKLVSDFRKDFQFYKVREINNYHHAHDAYLNAVVGTALIKKYPKLESEFVYGDYKVYDVRKMIAKSEQEIGKATAKYFFYSNIMNFFKTEITLANGEIRKRPLIETNGETGEIVWDKGRDFATVRKVLSMPQVNIVKKTEVQTGGFSKESILPKRNSDKLIARKKDWDPKKYGGFVSPTVAYSVLVVAKVEKGKSKKLKSVKELLGITIMERSSFEKNPIDFLEAKGYKEVKKDLIIKLPKYSLFELENGRKRMLASARELQKGNELALPSKYVNFLYLASHYEKLKGSPEDNEQKQLFVEQHKHYLDEIIEQISEFSKRVILADANLDKVLSAYNKHRDKPIREQAENIIHLFTLTNLGAPAAFKYFDTTIDRKQYRSTKEVLDATLIHQSITGLYETRIDLSQLGGDEGADKRTADGSEFESPKKKRKV

SEQ ID NO: 138 - protein, 1588 aa, Artificial Sequence
  Description of Artificial Sequence: Synthetic polypeptide
MSEVEFSHEYWMRHALTLAKRARDEREVPVGAVLVLNNRVIGEGWNRAIGLHDPTAHAEIMALRQGGLVMQNYRLYDATLYVTFEPCVMCAGAMIHSRIGRVVFGVRNAKTGAAGSLMDVLHYPGMNHRVEITEGILADECAALLCRFFRMPRRVFNAQKKAQSSTDSGGSSGGSSGSETPGTSESATPESSGGSSGGSDKKYSIGLAIGTNSVGWAVITDEYKVPSKKFKVLGNTDRHSIKKNLIGALLFDSGETAEATRLKRTARRRYTRRKNRICYLQEIFSNEMAKVDDSFFHRLEESFLVEEDKKHERHPIFGNIVDEVAYHEKYPTIYHLRKKLVDSTDKADLRLIYLALAHMIKFRGHFLIEGDLNPDNSDVDKLFIQLVQTYNQLFEENPINASGVDAKAILSARLSKSRRLENLIAQLPGEKKNGLFGNLIALSLGLTPNFKSNFDLAEDAKLQLSKDTYDDDLDNLLAQIGDQYADLFLAAKNLSDAILLSDILRVNTEITKAPLSASMIKRYDEHHQDLTLLKALVRQQLPEKYKEIFFDQSKNGYAGYIDGGASQEEFYKFIKPILEKMDGTEELLVKLNREDLLRKQRTFDNGSIPHQIHLGELHAILRRQEDFYPFLKDNREKIEKILTFRIPYYVGPLARGNSRFAWMTRKSEETITPWNFEEVVDKGASAQSFIERMTNFDKNLPNEKVLPKHSLLYEYFTVYNELTKVKYVTEGMRKPAFLSGEQKKAIVDLLFKTNRKVTVKQLKEDYFKKIECFDSVEISGVEDRFNASLGTYHDLLKIIKDKDFLDNEENEDILEDIVLTLTLFEDREMIEERLKTYAHLFDDKVMKQLKRRRYTGWGRLSRKLINGIRDKQSGKTILDFLKSDGFANRNFMQLIHDDSLTFKEDIQKAQVSGQGDSLHEHIANLAGSPAIKKGILQTVKVVDELVKVMGRHKPENIVIEMARENQTTQKGQKNSRERMKRIEEGIKELGSQILKEHPVENTQLQNEKLYLYYLQNGRDMYVDQELDINRLSDYDVDHIVPQSFLKDDSIDNKVLTRSDKNRGKSDNVPSEEVVKKMKNYWRQLLNAKLITQRKFDNLTKAERGGLSELDKAGFIKRQLVETRQITKHVAQILDSRMNTKYDENDKLIREVKVITLKSKLVSDFRKDFQFYKVREINNYHHAHDAYLNAVVGTALIKKYPKLESEFVYGDYKVYDVRKMIAKSEQEIGKATAKYFFYSNIMNFFKTEITLANGEIRKRPLIETNGETGEIVWDKGRDFATVRKVLSMPQVNIVKKTEVQTGGFSKESILPKRNSDKLIARKKDWDPKKYGGFVSPTVAYSVLVVAKVEKGKSKKLKSVKELLGITIMERSSFEKNPIDFLEAKGYKEVKKDLIIKLPKYSLFELENGRKRMLASARELQKGNELALPSKYVNFLYLASHYEKLKGSPEDNEQKQLFVEQHKHYLDEIIEQISEFSKRVILADANLDKVLSAYNKHRDKPIREQAENIIHLFTLTNLGAPAAFKYFDTTIDRKQYRSTKEVLDATLIHQSITGLYETRIDLSQLGGDEGADKRTADGSEFESPKKKRKV

SEQ ID NO: 139 - protein, 1588 aa, Artificial Sequence
  Description of Artificial Sequence: Synthetic polypeptide
MSEVEFSHEYWMRHALTLAKRARDEREVPVGAVLVLNNRVIGEGWNRAIGLHDPTAHAEIMALRQGGLVMQNYRLIDATLYVTFEPCVMCAGAMIHSRIGRVVFGVRNAKTGAAGSLMDVLHYPGMNHRVEITEGILADECAALLCRFFRMPRRVFNAQKKAQSSRDSGGSSGGSSGSETPGTSESATPESSGGSSGGSDKKYSIGLAIGTNSVGWAVITDEYKVPSKKFKVLGNTDRHSIKKNLIGALLFDSGETAEATRLKRTARRRYTRRKNRICYLQEIFSNEMAKVDDSFFHRLEESFLVEEDKKHERHPIFGNIVDEVAYHEKYPTIYHLRKKLVDSTDKADLRLIYLALAHMIKFRGHFLIEGDLNPDNSDVDKLFIQLVQTYNQLFEENPINASGVDAKAILSARLSKSRRLENLIAQLPGEKKNGLFGNLIALSLGLTPNFKSNFDLAEDAKLQLSKDTYDDDLDNLLAQIGDQYADLFLAAKNLSDAILLSDILRVNTEITKAPLSASMIKRYDEHHQDLTLLKALVRQQLPEKYKEIFFDQSKNGYAGYIDGGASQEEFYKFIKPILEKMDGTEELLVKLNREDLLRKQRTFDNGSIPHQIHLGELHAILRRQEDFYPFLKDNREKIEKILTFRIPYYVGPLARGNSRFAWMTRKSEETITPWNFEEVVDKGASAQSFIERMTNFDKNLPNEKVLPKHSLLYEYFTVYNELTKVKYVTEGMRKPAFLSGEQKKAIVDLLFKTNRKVTVKQLKEDYFKKIECFDSVEISGVEDRFNASLGTYHDLLKIIKDKDFLDNEENEDILEDIVLTLTLFEDREMIEERLKTYAHLFDDKVMKQLKRRRYTGWGRLSRKLINGIRDKQSGKTILDFLKSDGFANRNFMQLIHDDSLTFKEDIQKAQVSGQGDSLHEHIANLAGSPAIKKGILQTVKVVDELVKVMGRHKPENIVIEMARENQTTQKGQKNSRERMKRIEEGIKELGSQILKEHPVENTQLQNEKLYLYYLQNGRDMYVDQELDINRLSDYDVDHIVPQSFLKDDSIDNKVLTRSDKNRGKSDNVPSEEVVKKMKNYWRQLLNAKLITQRKFDNLTKAERGGLSELDKAGFIKRQLVETRQITKHVAQILDSRMNTKYDENDKLIREVKVITLKSKLVSDFRKDFQFYKVREINNYHHAHDAYLNAVVGTALIKKYPKLESEFVYGDYKVYDVRKMIAKSEQEIGKATAKYFFYSNIMNFFKTEITLANGEIRKRPLIETNGETGEIVWDKGRDFATVRKVLSMPQVNIVKKTEVQTGGFSKESILPKRNSDKLIARKKDWDPKKYGGFVSPTVAYSVLVVAKVEKGKSKKLKSVKELLGITIMERSSFEKNPIDFLEAKGYKEVKKDLIIKLPKYSLFELENGRKRMLASARELQKGNELALPSKYVNFLYLASHYEKLKGSPEDNEQKQLFVEQHKHYLDEIIEQISEFSKRVILADANLDKVLSAYNKHRDKPIREQAENIIHLFTLTNLGAPAAFKYFDTTIDRKQYRSTKEVLDATLIHQSITGLYETRIDLSQLGGDEGADKRTADGSEFESPKKKRKV

SEQ ID NO: 140 - protein, 1588 aa, Artificial Sequence
  Description of Artificial Sequence: Synthetic polypeptide
MSEVEFSHEYWMRHALTLAKRARDEREVPVGAVLVLNNRVIGEGWNRAIGLHDPTAHAEIMALRQGGLVMQNYRLIDATLYVTFEPCVMCAGAMIHSRIGRVVFGVRNAKTGAAGSLMDVLHYPGMNHRVEITEGILADECAALLCTFFRMPRRVFNAQKKAQSSTDSGGSSGGSSGSETPGTSESATPESSGGSSGGSDKKYSIGLAIGTNSVGWAVITDEYKVPSKKFKVLGNTDRHSIKKNLIGALLFDSGETAEATRLKRTARRRYTRRKNRICYLQEIFSNEMAKVDDSFFHRLEESFLVEEDKKHERHPIFGNIVDEVAYHEKYPTIYHLRKKLVDSTDKADLRLIYLALAHMIKFRGHFLIEGDLNPDNSDVDKLFIQLVQTYNQLFEENPINASGVDAKAILSARLSKSRRLENLIAQLPGEKKNGLFGNLIALSLGLTPNFKSNFDLAEDAKLQLSKDTYDDDLDNLLAQIGDQYADLFLAAKNLSDAILLSDILRVNTEITKAPLSASMIKRYDEHHQDLTLLKALVRQQLPEKYKEIFFDQSKNGYAGYIDGGASQEEFYKFIKPILEKMDGTEELLVKLNREDLLRKQRTFDNGSIPHQIHLGELHAILRRQEDFYPFLKDNREKIEKILTFRIPYYVGPLARGNSRFAWMTRKSEETITPWNFEEVVDKGASAQSFIERMTNFDKNLPNEKVLPKHSLLYEYFTVYNELTKVKYVTEGMRKPAFLSGEQKKAIVDLLFKTNRKVTVKQLKEDYFKKIECFDSVEISGVEDRFNASLGTYHDLLKIIKDKDFLDNEENEDILEDIVLTLTLFEDREMIEERLKTYAHLFDDKVMKQLKRRRYTGWGRLSRKLINGIRDKQSGKTILDFLKSDGFANRNFMQLIHDDSLTFKEDIQKAQVSGQGDSLHEHIANLAGSPAIKKGILQTVKVVDELVKVMGRHKPENIVIEMARENQTTQKGQKNSRERMKRIEEGIKELGSQILKEHPVENTQLQNEKLYLYYLQNGRDMYVDQELDINRLSDYDVDHIVPQSFLKDDSIDNKVLTRSDKNRGKSDNVPSEEVVKKMKNYWRQLLNAKLITQRKFDNLTKAERGGLSELDKAGFIKRQLVETRQITKHVAQILDSRMNTKYDENDKLIREVKVITLKSKLVSDFRKDFQFYKVREINNYHHAHDAYLNAVVGTALIKKYPKLESEFVYGDYKVYDVRKMIAKSEQEIGKATAKYFFYSNIMNFFKTEITLANGEIRKRPLIETNGETGEIVWDKGRDFATVRKVLSMPQVNIVKKTEVQTGGFSKESILPKRNSDKLIARKKDWDPKKYGGFVSPTVAYSVLVVAKVEKGKSKKLKSVKELLGITIMERSSFEKNPIDFLEAKGYKEVKKDLIIKLPKYSLFELENGRKRMLASARELQKGNELALPSKYVNFLYLASHYEKLKGSPEDNEQKQLFVEQHKHYLDEIIEQISEFSKRVILADANLDKVLSAYNKHRDKPIREQAENIIHLFTLTNLGAPAAFKYFDTTIDRKQYRSTKEVLDATLIHQSITGLYETRIDLSQLGGDEGADKRTADGSEFESPKKKRKV

SEQ ID NO: 141 - protein, 1588 aa, Artificial Sequence
  Description of Artificial Sequence: Synthetic polypeptide
MSEVEFSHEYWMRHALTLAKRARDEREVPVGAVLVLNNRVIGEGWNRAIGLHDPTAHAEIMALRQGGLVMQNYRLIDATLYVTFEPCVMCAGAMIHSRIGRVVFGVRNAKTGAAGSLMDVLHYPGMNHRVEITEGILADECAALLCTFFRMPRSVFNAQKKAQSSTDSGGSSGGSSGSETPGTSESATPESSGGSSGGSDKKYSIGLAIGTNSVGWAVITDEYKVPSKKFKVLGNTDRHSIKKNLIGALLFDSGETAEATRLKRTARRRYTRRKNRICYLQEIFSNEMAKVDDSFFHRLEESFLVEEDKKHERHPIFGNIVDEVAYHEKYPTIYHLRKKLVDSTDKADLRLIYLALAHMIKFRGHFLIEGDLNPDNSDVDKLFIQLVQTYNQLFEENPINASGVDAKAILSARLSKSRRLENLIAQLPGEKKNGLFGNLIALSLGLTPNFKSNFDLAEDAKLQLSKDTYDDDLDNLLAQIGDQYADLFLAAKNLSDAILLSDILRVNTEITKAPLSASMIKRYDEHHQDLTLLKALVRQQLPEKYKEIFFDQSKNGYAGYIDGGASQEEFYKFIKPILEKMDGTEELLVKLNREDLLRKQRTFDNGSIPHQIHLGELHAILRRQEDFYPFLKDNREKIEKILTFRIPYYVGPLARGNSRFAWMTRKSEETITPWNFEEVVDKGASAQSFIERMTNFDKNLPNEKVLPKHSLLYEYFTVYNELTKVKYVTEGMRKPAFLSGEQKKAIVDLLFKTNRKVTVKQLKEDYFKKIECFDSVEISGVEDRFNASLGTYHDLLKIIKDKDFLDNEENEDILEDIVLTLTLFEDREMIEERLKTYAHLFDDKVMKQLKRRRYTGWGRLSRKLINGIRDKQSGKTILDFLKSDGFANRNFMQLIHDDSLTFKEDIQKAQVSGQGDSLHEHIANLAGSPAIKKGILQTVKVVDELVKVMGRHKPENIVIEMARENQTTQKGQKNSRERMKRIEEGIKELGSQILKEHPVENTQLQNEKLYLYYLQNGRDMYVDQELDINRLSDYDVDHIVPQSFLKDDSIDNKVLTRSDKNRGKSDNVPSEEVVKKMKNYWRQLLNAKLITQRKFDNLTKAERGGLSELDKAGFIKRQLVETRQITKHVAQILDSRMNTKYDENDKLIREVKVITLKSKLVSDFRKDFQFYKVREINNYHHAHDAYLNAVVGTALIKKYPKLESEFVYGDYKVYDVRKMIAKSEQEIGKATAKYFFYSNIMNFFKTEITLANGEIRKRPLIETNGETGEIVWDKGRDFATVRKVLSMPQVNIVKKTEVQTGGFSKESILPKRNSDKLIARKKDWDPKKYGGFVSPTVAYSVLVVAKVEKGKSKKLKSVKELLGITIMERSSFEKNPIDFLEAKGYKEVKKDLIIKLPKYSLFELENGRKRMLASARELQKGNELALPSKYVNFLYLASHYEKLKGSPEDNEQKQLFVEQHKHYLDEIIEQISEFSKRVILADANLDKVLSAYNKHRDKPIREQAENIIHLFTLTNLGAPAAFKYFDTTIDRKQYRSTKEVLDATLIHQSITGLYETRIDLSQLGGDEGADKRTADGSEFESPKKKRKV

SEQ ID NO: 142 - protein, 1588 aa, Artificial Sequence
  Description of Artificial Sequence: Synthetic polypeptide
MSEVEFSHEYWMRHALTLAKRARDEREVPVGAVLVLNNRVIGEGWNRAIGLHDPTAHAEIMALRQGGLVMQNYRLYDATLYVTFEPCVMCAGAMIHSRIGRVVFGVRNAKTGAAGSLMDVLHHPGMNHRVEITEGILADECAALLCRFFRMPRRVFNAQKKAQSSTDSGGSSGGSSGSETPGTSESATPESSGGSSGGSDKKYSIGLAIGTNSVGWAVITDEYKVPSKKFKVLGNTDRHSIKKNLIGALLFDSGETAEATRLKRTARRRYTRRKNRICYLQEIFSNEMAKVDDSFFHRLEESFLVEEDKKHERHPIFGNIVDEVAYHEKYPTIYHLRKKLVDSTDKADLRLIYLALAHMIKFRGHFLIEGDLNPDNSDVDKLFIQLVQTYNQLFEENPINASGVDAKAILSARLSKSRRLENLIAQLPGEKKNGLFGNLIALSLGLTPNFKSNFDLAEDAKLQLSKDTYDDDLDNLLAQIGDQYADLFLAAKNLSDAILLSDILRVNTEITKAPLSASMIKRYDEHHQDLTLLKALVRQQLPEKYKEIFFDQSKNGYAGYIDGGASQEEFYKFIKPILEKMDGTEELLVKLNREDLLRKQRTFDNGSIPHQIHLGELHAILRRQEDFYPFLKDNREKIEKILTFRIPYYVGPLARGNSRFAWMTRKSEETITPWNFEEVVDKGASAQSFIERMTNFDKNLPNEKVLPKHSLLYEYFTVYNELTKVKYVTEGMRKPAFLSGEQKKAIVDLLFKTNRKVTVKQLKEDYFKKIECFDSVEISGVEDRFNASLGTYHDLLKIIKDKDFLDNEENEDILEDIVLTLTLFEDREMIEERLKTYAHLFDDKVMKQLKRRRYTGWGRLSRKLINGIRDKQSGKTILDFLKSDGFANRNFMQLIHDDSLTFKEDIQKAQVSGQGDSLHEHIANLAGSPAIKKGILQTVKVVDELVKVMGRHKPENIVIEMARENQTTQKGQKNSRERMKRIEEGIKELGSQILKEHPVENTQLQNEKLYLYYLQNGRDMYVDQELDINRLSDYDVDHIVPQSFLKDDSIDNKVLTRSDKNRGKSDNVPSEEVVKKMKNYWRQLLNAKLITQRKFDNLTKAERGGLSELDKAGFIKRQLVETRQITKHVAQILDSRMNTKYDENDKLIREVKVITLKSKLVSDFRKDFQFYKVREINNYHHAHDAYLNAVVGTALIKKYPKLESEFVYGDYKVYDVRKMIAKSEQEIGKATAKYFFYSNIMNFFKTEITLANGEIRKRPLIETNGETGEIVWDKGRDFATVRKVLSMPQVNIVKKTEVQTGGFSKESILPKRNSDKLIARKKDWDPKKYGGFVSPTVAYSVLVVAKVEKGKSKKLKSVKELLGITIMERSSFEKNPIDFLEAKGYKEVKKDLIIKLPKYSLFELENGRKRMLASARELQKGNELALPSKYVNFLYLASHYEKLKGSPEDNEQKQLFVEQHKHYLDEIIEQISEFSKRVILADANLDKVLSAYNKHRDKPIREQAENIIHLFTLTNLGAPAAFKYFDTTIDRKQYRSTKEVLDATLIHQSITGLYETRIDLSQLGGDEGADKRTADGSEFESPKKKRKV

SEQ ID NO: 143 - protein, 1588 aa, Artificial Sequence
  Description of Artificial Sequence: Synthetic polypeptide
MSEVEFSHEYWMRHALTLAKRARDEREVPVGAVLVLNNRVIGEGWNRAIGLHDPTAHAEIMALRQGGLVMQNYRLIDATLYSTFEPCVMCAGAMIHSRIGRVVFGVRNAKTGAAGSLMDVLHYPGMNHRVEITEGILADECAALLCYFFRMPRRVFNAQKKAQSSTDSGGSSGGSSGSETPGTSESATPESSGGSSGGSDKKYSIGLAIGTNSVGWAVITDEYKVPSKKFKVLGNTDRHSIKKNLIGALLFDSGETAEATRLKRTARRRYTRRKNRICYLQEIFSNEMAKVDDSFFHRLEESFLVEEDKKHERHPIFGNIVDEVAYHEKYPTIYHLRKKLVDSTDKADLRLIYLALAHMIKFRGHFLIEGDLNPDNSDVDKLFIQLVQTYNQLFEENPINASGVDAKAILSARLSKSRRLENLIAQLPGEKKNGLFGNLIALSLGLTPNFKSNFDLAEDAKLQLSKDTYDDDLDNLLAQIGDQYADLFLAAKNLSDAILLSDILRVNTEITKAPLSASMIKRYDEHHQDLTLLKALVRQQLPEKYKEIFFDQSKNGYAGYIDGGASQEEFYKFIKPILEKMDGTEELLVKLNREDLLRKQRTFDNGSIPHQIHLGELHAILRRQEDFYPFLKDNREKIEKILTFRIPYYVGPLARGNSRFAWMTRKSEETITPWNFEEVVDKGASAQSFIERMTNFDKNLPNEKVLPKHSLLYEYFTVYNELTKVKYVTEGMRKPAFLSGEQKKAIVDLLFKTNRKVTVKQLKEDYFKKIECFDSVEISGVEDRFNASLGTYHDLLKIIKDKDFLDNEENEDILEDIVLTLTLFEDREMIEERLKTYAHLFDDKVMKQLKRRRYTGWGRLSRKLINGIRDKQSGKTILDFLKSDGFANRNFMQLIHDDSLTFKEDIQKAQVSGQGDSLHEHIANLAGSPAIKKGILQTVKVVDELVKVMGRHKPENIVIEMARENQTTQKGQKNSRERMKRIEEGIKELGSQILKEHPVENTQLQNEKLYLYYLQNGRDMYVDQELDINRLSDYDVDHIVPQSFLKDDSIDNKVLTRSDKNRGKSDNVPSEEVVKKMKNYWRQLLNAKLITQRKFDNLTKAERGGLSELDKAGFIKRQLVETRQITKHVAQILDSRMNTKYDENDKLIREVKVITLKSKLVSDFRKDFQFYKVREINNYHHAHDAYLNAVVGTALIKKYPKLESEFVYGDYKVYDVRKMIAKSEQEIGKATAKYFFYSNIMNFFKTEITLANGEIRKRPLIETNGETGEIVWDKGRDFATVRKVLSMPQVNIVKKTEVQTGGFSKESILPKRNSDKLIARKKDWDPKKYGGFVSPTVAYSVLVVAKVEKGKSKKLKSVKELLGITIMERSSFEKNPIDFLEAKGYKEVKKDLIIKLPKYSLFELENGRKRMLASARELQKGNELALPSKYVNFLYLASHYEKLKGSPEDNEQKQLFVEQHKHYLDEIIEQISEFSKRVILADANLDKVLSAYNKHRDKPIREQAENIIHLFTLTNLGAPAAFKYFDTTIDRKQYRSTKEVLDATLIHQSITGLYETRIDLSQLGGDEGADKRTADGSEFESPKKKRKV

SEQ ID NO: 144 - protein, 4 aa, Artificial Sequence
  Description of Artificial Sequence: Synthetic peptide
GGGS

SEQ ID NO: 145 - protein, 5 aa, Artificial Sequence
  Description of Artificial Sequence: Synthetic peptide
GGGGS

SEQ ID NO: 146 - protein, 5 aa, Artificial Sequence
  Description of Artificial Sequence: Synthetic peptide
EAAAK

SEQ ID NO: 147 - protein, 21 aa, Artificial Sequence
  Description of Artificial Sequence: Synthetic peptide
  MISC_FEATURE (1)..(21): This sequence may encompass 1, 3 or 7 "Gly Gly Ser" repeating units
GGSGGSGGSGGSGGSGGSGGS

SEQ ID NO: 148 - protein, 5 aa, Artificial Sequence
  Description of Artificial Sequence: Synthetic peptide
PAPAP

SEQ ID NO: 149 - protein, 6 aa, Artificial Sequence
  Description of Artificial Sequence: Synthetic peptide
PAPAPA

SEQ ID NO: 150 - protein, 7 aa, Artificial Sequence
  Description of Artificial Sequence: Synthetic peptide
PAPAPAP

SEQ ID NO: 151 - protein, 8 aa, Artificial Sequence
  Description of Artificial Sequence: Synthetic peptide
PAPAPAPA

SEQ ID NO: 152 - protein, 9 aa, Artificial Sequence
  Description of Artificial Sequence: Synthetic peptide
PAPAPAPAP

SEQ ID NO: 153 - protein, 15 aa, Artificial Sequence
  Description of Artificial Sequence: Synthetic peptide
PAPAPAPAPAPAPAP

SEQ ID NO: 154 - protein, 21 aa, Artificial Sequence
  Description of Artificial Sequence: Synthetic peptide
PAPAPAPAPAPAPAPAPAPAP

SEQ ID NO: 155 - DNA, 117 bp, Artificial Sequence
  Description of Artificial Sequence: Synthetic oligonucleotide
  Description of Combined DNA/RNA Molecule: Synthetic oligonucleotide
  modified_base (98)..(117): a, c, t, g, unknown or other
guucugtcuuuuggucaggacaaccgucuagcuauaagugcugcagggugugagaaacuccuauugcuggacgaugucucuuacgaggcauuagcacnnnnnnnnnnnnnnnnnnnn

SEQ ID NO: 156 - RNA, 108 nt, Artificial Sequence
  Description of Artificial Sequence: Synthetic polynucleotide
  modified_base (89)..(108): a, c, u, g, unknown or other
gaccuauagggucaaugaaucugugcgugugccauaaguaauuaaaaauuacccaccacaggagcaccugaaaacaggugcuuggcacnnnnnnnnnnnnnnnnnnnn

SEQ ID NO: 157 - RNA, 119 nt, Artificial Sequence
  Description of Artificial Sequence: Synthetic polynucleotide
  modified_base (100)..(119): a, c, u, g, unknown or other
gucuaaaggacagaauuuuucaacgggugugccaauggccacuuuccagguggcaaagcccguugaacuucucaaaaagaacgaucugagaaguggcacnnnnnnnnnnnnnnnnnnnn

SEQ ID NO: 158 - protein, 20 aa, Artificial Sequence
  Description of Artificial Sequence: Synthetic peptide
GSSGSETPGTSESATPESSG

SEQ ID NO: 159 - DNA, 18 bp, Artificial Sequence
  Description of Artificial Sequence: Synthetic oligonucleotide
ggaggctctggaggaagc

SEQ ID NO: 160 - DNA, 60 bp, Artificial Sequence
  Description of Artificial Sequence: Synthetic oligonucleotide
ggctcttctggatctgaaacacctggcacaagcgagagcgccacccctgagagctctggc

SEQ ID NO: 161 - protein, 17 aa, Artificial Sequence
  Description of Artificial Sequence: Synthetic peptide
MAPKKKRKVGIHGVPAA

SEQ ID NO: 162 - DNA, 51 bp, Artificial Sequence
  Description of Artificial Sequence: Synthetic oligonucleotide
atggccccaaagaagaagcggaaggtcggtatccacggagtcccagcagcc

SEQ ID NO: 163 - protein, 357 aa, Homo sapiens
MEEGMNVLHDFGIQSTHYLQVNYQDSQDWFILVSVIADLRNAFYVLFPIWFHLQEAVGIKLLWVAVIGDWLNLVFKWILFGQRPYWWVLDTDYYSNTSVPLIKQFPVTCETGPGSPSGHAMGTAGVYYVMVTSTLSIFQGKIKPTYRFRCLNVILWLGFWAVQLNVCLSRIYLAAHFPHQVVAGVLSGIAVTETFSHIHSIYNASLKKYFLITFFLFSFAIGFYLLLKGLGVDLLWTLEKAQRWCEQPEWVHIDTTPFASLLKNLGTLFGLGLALNSSMYRESCKGKLSKWLPFRLSSIVASLVLLHVFDSLKPPSQVELVFYVLSFCKSAVVPLASVSVIPYCLAQVLGQPHKKSL

SEQ ID NO: 164 - DNA, 3095 bp, Homo sapiens
tagcagagcaatcaccaccaagcctggaataactgcaagggctctgctgacatcttcctgaggtgccaaggaaatgaggatggaggaaggaatgaatgttctccatgactttgggatccagtcaacacattacctccaggtgaattaccaagactcccaggactggttcatcttggtgtccgtgatcgcagacctcaggaatgccttctacgtcctcttccccatctggttccatcttcaggaagctgtgggcattaaactcctttgggtagctgtgattggagactggctcaacctcgtctttaagtggattctctttggacagcgtccatactggtgggttttggatactgactactacagcaacacttccgtgcccctgataaagcagttccctgtaacctgtgagactggaccagggagcccctctggccatgccatgggcacagcaggtgtatactacgtgatggtcacatctactctttccatctttcagggaaagataaagccgacctacagatttcggtgcttgaatgtcattttgtggttgggattctgggctgtgcagctgaatgtctgtctgtcacgaatctaccttgctgctcattttcctcatcaagttgttgctggagtcctgtcaggcattgctgttacagaaactttcagccacatccacagcatctataatgccagcctcaagaaatattttctcattaccttcttcctgttcagcttcgccatcggattttatctgctgctcaagggactgggtgtagacctcctgtggactctggagaaagcccagaggtggtgcgagcagccagaatgggtccacattgacaccacaccctttgccagcctcctcaagaacctgggcacgctctttggcctggggctggctctcaactccagcatgtacagggagagctgcaaggggaaactcagcaagtggctcccattccgcctcagctctattgtagcctccctcgtcctcctgcacgtctttgactccttgaaacccccatcccaagtcgagctggtcttctacgtcttgtccttctgcaagagtgcggtagtgcccctggcatccgtcagtgtcatcccctactgcctcgcccaggtcctgggccagccgcacaagaagtcgttgtaagagatgtggagtcttcggtgtttaaagtcaacaaccatgccagggattgaggaggactactatttgaagcaatgggcactggtatttggagcaagtgacatgccatccattctgccgtcgtggaattaaatcacggatggcagattggagggtcgcctggcttattcccatgtgtgactccagcctgccctcagcacagactctttcagatggaggtgccatatcacgtacaccatatgcaagtttcccgccaggaggtcctcctctctctacttgaatactctcacaagtagggagctcactcccactggaacagcccattttatctttgaatggtcttctgccagcccattttgaggccagaggtgctgtcagctcaggtggtcctcttttacaatcctaatcatattgggtaatgtttttgaaaagctaatgaagctattgagaaagacctgttgctagaagttgggttgttctggattttcccctgaagacttacttattcttccgtcacatatacaaaagcaagacttccaggtagggccagctcacaagcccaggctggagatcctaactgagaattttctacctgtgttcattcttaccgagaaaaggagaaaggagctctgaatctgataggaaaagaaggctgcctaaggaggagtttttagtatgtggcgtatcatgcaagtgctatgccaagccatgtctaaatggctttaattatatagtaatgcactctcagtaatgggggaccagcttaagtataattaatagatggttagtggggtaattctgcttctagtattttttttactgtgcatacatgttcatcgtatttccttggatttctgaatggctgcagtgacccagatattgcactaggtcaaaacattcaggtatagctgacatctcctctatcacattacatcatcctccttataagcccagctctgctttttccagattcttccactggctccacatccaccccactggatcttcagaaggctagagggcgactctggtggtgcttttgtatgtttcaattaggctctgaaatcttgggcaaaatgacaaggggagggccaggattcctctctcaggtcactccagtgttacttttaattcctagagggtaaatatgactcctttctctatcccaagccaaccaagagcacattcttaaaggaaaagtcaacatcttctctctttttttttttttttgagacagggtctcactatgttgcccaggctgctcttgaattcctgggctcaagcagtcctcccaccctaccacagcgtcccgcgtagctggcatacaggtgcaagccactatgtccagctagccaactcctccttgcctgcttttctttttttttctttttttgagacggcgcacctatcacccaggctggagtggagtggcacgatcttggctcactgcaacctcttcctcctggttcaagcgattctcatgtctcagcctcctcagtagctaggactaccggcgtgcaccaccatgccaggctaatttttatatttttagaattttagaagagatgggatttcatcatgttggccaggctggtctcgaactcctgacctcaagtgatccacctgccttggcctcccaaggtgctaggattacaggcatgagccaccgcaccgggccctccttgcctgtttttcaatctcatctgatatgcagagtatttctgccccacccacctaccccccaaaaaaagctgaagcctatttatttgaaagtccttgtttttgctactaattatatagtataccatacattatcattcaaaacaaccatcctgctcataacatctttgaaaagaaaaatatatatgtgcagtattttattaaagcaacattttatttaagaataaagtcttgttaattactatattttagatgcaatgtgatc

SEQ ID NO: 165 - DNA, 20 bp, Artificial Sequence
  Description of Artificial Sequence: Synthetic oligonucleotide
gacctaggcgaggcagtagg

SEQ ID NO: 166 - DNA, 30 bp, Artificial Sequence
  Description of Artificial Sequence: Synthetic oligonucleotide
ccaccagtatggacactgtccaaagagaat

SEQ ID NO: 167 - protein, 10 aa, Artificial Sequence
  Description of Artificial Sequence: Synthetic peptide
WWYPCQGFLI

SEQ ID NO: 168 - DNA, 20 bp, Artificial Sequence
  Description of Artificial Sequence: Synthetic oligonucleotide
ccagttggacactgtccaaa

SEQ ID NO: 169 - DNA, 21 bp, Artificial Sequence
  Description of Artificial Sequence: Synthetic oligonucleotide
ccagtatggacactgtccaaa

SEQ ID NO: 170 - DNA, 21 bp, Artificial Sequence
  Description of Artificial Sequence: Synthetic oligonucleotide
ccagtatggacgctgtccaaa

SEQ ID NO: 171 - DNA, 21 bp, Artificial Sequence
  Description of Artificial Sequence: Synthetic oligonucleotide
ccagtgtggacactgtccaaa

SEQ ID NO: 172 - DNA, 21 bp, Artificial Sequence
  Description of Artificial Sequence: Synthetic oligonucleotide
ccagtatgggcactgtccaaa

SEQ ID NO: 173 - DNA, 21 bp, Artificial Sequence
  Description of Artificial Sequence: Synthetic oligonucleotide
ccagtgtggacgctgtccaaa

SEQ ID NO: 174 - DNA, 21 bp, Artificial Sequence
  Description of Artificial Sequence: Synthetic oligonucleotide
ccagtatgggcgctgtccaaa

SEQ ID NO: 175 - RNA, 19 nt, Artificial Sequence
  Description of Artificial Sequence: Synthetic oligonucleotide
aguauggacacuguccaaa

SEQ ID NO: 176 - DNA, 20 bp, Artificial Sequence
  Description of Artificial Sequence: Synthetic oligonucleotide
cagtatggacactgtccaaa

SEQ ID NO: 177 - DNA, 28 bp, Artificial Sequence
  Description of Artificial Sequence: Synthetic oligonucleotide
cccctactgcctcgcctaggtcctgggc

SEQ ID NO: 178 - protein, 5 aa, Artificial Sequence
  Description of Artificial Sequence: Synthetic peptide
PYCLA

SEQ ID NO: 179 - DNA, 19 bp, Artificial Sequence
  Description of Artificial Sequence: Synthetic oligonucleotide
gaccaggcgaggcagtagg

SEQ ID NO: 180 - protein, 6 aa, Artificial Sequence
  Description of Artificial Sequence: Synthetic peptide
VQALCY

SEQ ID NO: 181 - DNA, 30 bp, Artificial Sequence
  Description of Artificial Sequence: Synthetic oligonucleotide
attctctttggacagtgtccatactggtgg

SEQ ID NO: 182 - protein, 10 aa, Artificial Sequence
  Description of Artificial Sequence: Synthetic peptide
ILFGQCPYWW

SEQ ID NO: 183 - DNA, 20 bp, Artificial Sequence
  Description of Artificial Sequence: Synthetic oligonucleotide
agtatggacactgtccaaag

SEQ ID NO: 184 - DNA, 27 bp, Artificial Sequence
  Description of Artificial Sequence: Synthetic oligonucleotide
ccagtatggacactgtccaaagagaat

SEQ ID NO: 185 - DNA, 19 bp, Artificial Sequence
  Description of Artificial Sequence: Synthetic oligonucleotide
agtatggacactgtccaaa

SEQ ID NO: 186 - protein, 4 aa, Artificial Sequence
  Description of Artificial Sequence: Synthetic peptide
SGGS

1. A method of editing a glucose-6-phosphatase (G6PC) polynucleotide comprising a single nucleotide polymorphism (SNP) associated with Glycogen Storage Disease Type 1a (GSD1a), the method comprising contacting the G6PC polynucleotide with an Adenosine Deaminase Base Editor 8 (ABE8) in a complex with one or more guide polynucleotides, wherein the Adenosine Deaminase Base Editor 8 (ABE8) comprises a polynucleotide programmable DNA binding domain and an adenosine deaminase domain, and wherein one or more of said guide polynucleotides target said base editor to effect an A•T to G•C alteration of the SNP associated with GSD1a.

2-5. (canceled)

6. The method of claim 1, wherein the A•T to G•C alteration at the SNP associated with GSD1a results in expression of an G6PC polypeptide having a non-glutamine (X) amino acid at position 347 or a non-arginine (X) amino acid at position 83.

7. (canceled)

8. The method of claim 1, wherein the A•T to G•C alteration at the SNP associated with GSD1a results in expression of a G6PC polypeptide that prematurely terminates at amino acid position 347 or at a cysteine at position 83.

9. The method of claim 1, wherein the A•T to G•C alteration at the SNP encodes one or more of Q347X and/or R83C.

10-22. (canceled)

23. The method of claim 1, wherein the adenosine deaminase domain is a monomer comprising an adenosine deaminase variant or a heterodimer comprising a wild-type adenosine deaminase domain and an adenosine deaminase variant.

24. (canceled)

25. The method of claim 23 , wherein the adenosine deaminase variant comprises an amino acid sequence of:
MSEVEFSHEYWMRHALTLAKRARDEREVPVGAVLVLNNRVIGEGWNRAIG
LHDPTAHAEIMALRQGGLVMQNYRLIDATLYVTFEPCVMCAGAMIHSRIG
RVVFGVRNAKTGAAGSLMDVLHYPGMNHRVEITEGILADECAALLCYFFR
MPRQVFNAQKKAQSSTD;
wherein the amino acid sequence comprises a V82S alteration.

26. The method of claim 25, wherein the amino acid sequence further comprises at least one alteration selected from the group consisting of: Y147T, Y147R, Q154S, Y123H, and Q154R.

27. The method of claim 25, wherein the amino acid sequence comprises a combination of alterations selected from the group consisting of: Y147T+Q154R; Y147T+Q154S; Y147R+Q154S; V82S+Q154S; V82S+Y147R; V82S+Q154R; V82S+Y123H; I76Y+V82S; V82S+Y123H+Y147T; V82S+Y123H+Y147R; V82S+Y123H+Q154R; Y147R+Q154R+Y123H; Y147R+Q154R+I76Y; Y147R+Q154R+T166R; Y123H+Y147R+Q154R+I76Y; V82S+Y123H+Y147R+Q154R; and
I76Y+V82S+Y123H+Y147R+Q154R.

28-36. (canceled)

37. A cell comprising:
an Adenosine Deaminase Base Editor 8 (ABE8), or a polynucleotide encoding said base editor, wherein said Adenosine Deaminase Base Editor 8 (ABE8) comprises a polynucleotide programmable DNA binding domain and an adenosine deaminase domain comprising an amino acid sequence of:
MSEVEFSHEYWMRHALTLAKRARDEREVPVGAVLVLNNRVIGEGWNRAIG
LHDPTAHAEIMALRQGGLVMQNYRLIDATLYVTFEPCVMCAGAMIHSRIG
RVVFGVRNAKTGAAGSLMDVLHYPGMNHRVEITEGILADECAALLCYFFR
MPRQVFNAQKKAQSSTD;
wherein the amino acid sequence comprises a V82S alteration; and
one or more guide polynucleotides that target the base editor to effect an A•T to G•C alteration of the SNP associated with GSD1a.

38-66. (canceled)

67. The cell of claim 37, wherein the guide polynucleotide comprises a nucleic acid sequence selected from the group consisting of:
a) GACCUAGGCGAGGCAGUAGG;
b) CCAGUAUGGACACUGUCCAAA;
c) CAGUAUGGACACUGUCCAAA;
and
d) AGUAUGGACACUGUCCAAAG.

68-76. (canceled)

77. A method of treating GSD1a in a subject comprising administering to said subject:
an Adenosine Deaminase Base Editor 8 (ABE8), or a polynucleotide encoding said base editor, wherein said Adenosine Deaminase Base Editor 8 (ABE8) comprises a polynucleotide programmable DNA binding domain and an adenosine deaminase domain; and
one or more guide polynucleotides that target the Adenosine Deaminase Base Editor 8 (ABE8) to effect an A•T to G•C alteration of the SNP associated with GSD1a.

78-80. (canceled)

81. The method of claim 77, wherein the A•T to G•C alteration at the SNP associated with GSD1a results in expression of a G6PC polypeptide that prematurely terminates at amino acid position 347 or encodes a cysteine at position 83.

82. The method of claim 77, wherein the alteration is one or more of Q347X and/or R83C.

83-108. (canceled)

109. A method of producing a hepatocyte, or progenitor thereof, the method comprising:
(a) introducing into an induced pluripotent stem cell or hepatocyte progenitor comprising a SNP associated with GSD1a,
an Adenosine Deaminase Base Editor 8 (ABE8), or a polynucleotide encoding the Adenosine Deaminase Base Editor 8 (ABE8), wherein the base editor comprises a polynucleotide-programmable nucleotide-binding domain and an adenosine deaminase domain; and
one or more guide polynucleotides, wherein the one or more guide polynucleotides target the base editor to effect an A•T to G•C alteration of the SNP associated with GSD1a; and
(b) differentiating the induced pluripotent stem cell into a hepatocyte or progenitor thereof.

110. The method of claim 109, wherein the hepatocyte progenitor is obtained from a subject having GSD1a.

111-112. (canceled)

113. The method of claim 109, wherein the A•T to G•C alteration at the SNP associated with GSD1a results in expression of an G6PC polypeptide having a non-glutamine (X) amino acid at position 347 or a non-arginine (X) amino acid at position 83.

114. The method of claim 109, wherein the induced pluripotent stem cell of step (a) comprises a Q347X or R83C mutation.

115. (canceled)

116-129. (canceled)

130. A method of editing a glucose-6-phosphatase (G6PC) polynucleotide comprising a single nucleotide polymorphism (SNP) associated with Glycogen Storage Disease Type 1a (GSD1a), the method comprising contacting the G6PC polynucleotide with an Adenosine Deaminase Base Editor 8 (ABE8) in a complex with one or more guide polynucleotides, wherein the Adenosine Deaminase Base Editor 8 (ABE8) comprises an adenosine deaminase variant domain inserted within a Cas9 or a Cas12 polypeptide, and wherein one or more of said guide polynucleotides target said base editor to effect an A•T to G•C alteration of the SNP associated with GSD1a.

131. (canceled)

132. A method for treating Glycogen Storage Disease Type 1a (GSD1a) in a subject, the method comprising administering to the subject:
a fusion protein comprising an adenosine deaminase variant inserted within a Cas9 or a Cas12 polypeptide, or a polynucleotide encoding said fusion protein;
and one or more guide polynucleotides to target the fusion protein to effect an A•T to G•C alteration of a single nucleotide polymorphism (SNP) associated with GSD1a, thereby treating GSD1a in the subject.

133. (canceled)

134. The method of claim 132, wherein the adenosine deaminase variant comprises the amino acid sequence of:
MSEVEFSHEYWMRHALTLAKRARDEREVPVGAVLVLNNRVIGEGWNRAIG
LHDPTAHAEIMALRQGGLVMQNYRLIDATLYVTFEPCVMCAGAMIHSRIG
RVVFGVRNAKTGAAGSLMDVLHYPGMNHRVEITEGILADECAALLCYFFR
MPRQVFNAQKKAQSSTD;
wherein the amino acid sequence comprises a V82S alteration.

135. (canceled)

136. The method of claim 134, wherein the amino acid sequence further comprises at least one alteration selected from the group consisting of: T166R, Y147T, Y147R, Q154S, Y123H, and Q154R.

137-145. (canceled)

146. The method of claim 132, wherein the A•T to G•C alteration at the SNP associated with GSD1a replaces the a non-glutamine amino acid (X) at position 347 with a glutamine or the a non-arginine amino acid (X) at position 83 with an arginine.

147-183. (canceled)

184. A pharmaceutical composition for the treatment of Glycogen Storage Disease Type 1a (GSD1a) comprising an effective amount of an Adenosine Deaminase Base Editor 8 (ABE8), wherein said Adenosine Deaminase Base Editor 8 (ABE8) comprises a polynucleotide programmable DNA binding domain and an adenosine deaminase variant domain, and optionally comprising one or more guide polynucleotides that are capable of targeting the Adenosine Deaminase Base Editor 8 (ABE8) to effect an A•T to G•C alteration of a SNP associated with GSD1a.

185-187. (canceled)

188. A pharmaceutical composition for the treatment of Glycogen Storage Disease Type 1a (GSD1a) comprising an effective amount of the cell of claim 37.

189. (canceled)

190. A kit for the treatment of Glycogen Storage Disease Type 1a (GSD1a), the kit comprising an Adenosine Deaminase Base Editor 8 (ABE8), wherein said Adenosine Deaminase Base Editor 8 (ABE8) comprises a polynucleotide programmable DNA binding domain and an adenosine deaminase domain, and one or more guide polynucleotides that are capable of targeting the Adenosine Deaminase Base Editor 8 (ABE8) to effect an A•T to G•C alteration of a SNP associated with GSD1a.

191. A kit for the treatment of Glycogen Storage Disease Type 1a (GSD1a), the kit comprising the cell of claim 37.

192. A base editor comprising an Adenosine Deaminase Base Editor 8 (ABE8) in a complex with one or more guide polynucleotides, wherein the Adenosine Deaminase Base Editor 8 (ABE8) comprises a polynucleotide programmable DNA binding domain and an adenosine deaminase variant domain comprising a V82S alteration or a T166R alteration, and wherein one or more of said guide polynucleotides target said base editor to effect an A•T to G•C alteration of the SNP associated with GSD1a.

193. (canceled)

194. The base editor system of claim 193, wherein the adenosine deaminase variant further comprises one or more of the following alterations: Y147T, Y147R, Q154S, Y123H, and Q154R.

195-201. (canceled)

202. A base editor system comprising one or more guide RNAs and a fusion protein comprising a polynucleotide programmable DNA binding domain comprising the following sequence:
EIGKATAKYFFYSNIMNFFKTEITLANGEIRKRPLIETNGETGEIVWDKG
RDFATVRKVLSMPQVNIVKKTEVQTGGFSKESILPKRNSDKLIARKKDWD
PKKYGGFMQPTVAYSVLVVAKVEKGKSKKLKSVKELLGITIMERSSFEKN
PIDFLEAKGYKEVKKDLIIKLPKYSLFELENGRKRMLASAKFLQKGNELA
LPSKYVNFLYLASHYEKLKGSPEDNEQKQLFVEQHKHYLDEIIEQISEFS
KRVILADANLDKVLSAYNKHRDKPIREQAENIIHLFTLTNLGAPRAFKYF
DTTIARKEYRSTKEVLDATLIHQSITGLYETRIDLSQLGGDGGSGGSGGS
GGSGGSGGSGGMDKKYSIGLAIGTNSVGWAVITDEYKVPSKKFKVLGNTD
RHSIKKNLIGALLFDSGETAEATRLKRTARRRYTRRKNRICYLQEIFSNE
MAKVDDSFFHRLEESFLVEEDKKHERHPIFGNIVDEVAYHEKYPTIYHLR
KKLVDSTDKADLRLIYLALAHMIKFRGHFLIEGDLNPDNSDVDKLFIQLV
QTYNQLFEENPINASGVDAKAILSARLSKSRRLENLIAQLPGEKKNGLFG
NLIALSLGLTPNFKSNFDLAEDAKLQLSKDTYDDDLDNLLAQIGDQYADL
FLAAKNLSDAILLSDILRVNTEITKAPLSASMIKRYDEHHQDLTLLKALV
RQQLPEKYKEIFFDQSKNGYAGYIDGGASQEEFYKFIKPILEKMDGTEEL
LVKLNREDLLRKQRTFDNGSIPHQIHLGELHAILRRQEDFYPFLKDNREK
IEKILTFRIPYYVGPLARGNSRFAWMTRKSEETITPWNFEEVVDKGASAQ
SFIERMTNFDKNLPNEKVLPKHSLLYEYFTVYNELTKVKYVTEGMRKPAF
LSGEQKKAIVDLLFKTNRKVTVKQLKEDYFKKIECFDSVEISGVEDRFNA
SLGTYHDLLKIIKDKDFLDNEENEDILEDIVLTLTLFEDREMIEERLKTY
AHLFDDKVMKQLKRRRYTGWGRLSRKLINGIRDKQSGKTILDFLKSDGFA
NRNFMQLIHDDSLTFKEDIQKAQVSGQGDSLHEHIANLAGSPAIKKGILQ
TVKVVDELVKVMGRHKPENIVIEMARENQTTQKGQKNSRERMKRIEEGIK
ELGSQILKEHPVENTQLQNEKLYLYYLQNGRDMYVDQELDINRLSDYDVD
HIVPQSFLKDDSIDNKVLTRSDKNRGKSDNVPSEEVVKKMKNYWRQLLNA
KLITQRKFDNLTKAERGGLSELDKAGFIKRQLVETRQITKHVAQILDSRM
NTKYDENDKLIREVKVITLKSKLVSDFRKDFQFYKVREINNYHHAHDAYL
NAVVGTALIKKYPKLESEFVYGDYKVYDVRKMIAKSEQEGADKRTADGSE
FESPKKKRKV*,
wherein the bold sequence indicates sequence derived from Cas9, the italics sequence denotes a linker sequence, and the underlined sequence denotes a bipartite nuclear localization sequence, and at least one base editor domain comprising an adenosine deaminase variant comprising an alteration at amino acid position 82 and/or 166 of MSEVEFSHEYWMRHALTLAKRARDEREVPVGAVLVLNNRVIGEGWNRAIGLHDPTAHAEI MALRQGGLVMQNYRLIDATLYVTFEPCVMCAGAMIHSRIGRVVFGVRNAKTGAAGSLMD VLHYPGMNHRVEITEGILADECAALLCYFFRMPRQVFNAQKKAQSSTD, and wherein one or more of said guide polynucleotides target said base editor to effect an A•T to G•C alteration of the SNP associated with GSD1a.

203. A cell comprising the base editor system of claim 202.

204-205. (canceled)
